(19) United States
(12) Patent Application Publication
(10) Pub. No.: US 2025/0213729 A1
(43) Pub. Date: Jul. 3, 2025

(54) METHOD TO STIMULATE REGENERATION OF RETINAL GANGLION CELLS

(71) Applicant: UNIVERSITY OF WASHINGTON, SEATTLE, WA (US)

(72) Inventors: Levi J. Todd, SEATTLE, WA (US); Thomas A. Reh, SEATTLE, WA (US); Wesley Jenkins, SEATTLE, WA (US); Marina Pavlou, SEATTLE, WA (US); Juliette Wohlschlegel, SEATTLE, WA (US)

(73) Assignee: UNIVERSITY OF WASHINGTON, SEATTLE, WA (US)

(21) Appl. No.: 18/852,391

(22) PCT Filed: Mar. 31, 2023
(86) PCT No.: PCT/US23/65219

§ 371 Date: Sep. 27, 2024

Related U.S. Application Data
(60) Provisional application No. 63/362,361, filed on Apr. 1, 2022.

(51) Int. Cl. A61K 48/00; C07K 14/47; C12N 15/86

(52) U.S. Cl. CPC A61K 48/0058; C07K 14/47; C12N 15/86; C12N 2750/14143; C12N 2830/008

(57) ABSTRACT

Compositions, nucleic acid molecules and methods for inducing retinal regeneration and reprogramming of Müller glia (MG) into retinal ganglion cells in a subject are described. Developmental retinal ganglion cell (RGC) transcription factors Pou4f2 and Islet1 increase the Ascl1-induced neurogenic capacity of MG. The combination of Ascl1, Pou4f2 and Islet1 stimulates MG to generate bipolar cells and RGC-like neurons. Likewise, the transcription factor Onecut1, which is expressed in developing retinal cells, but not in MG, induces MG to generate RCG-like cells. Additional transcription factors that can be used include Irx2, Irx5, Neurod2, Ebf1, and Tcf3. MG-derived RGCs can exhibit action potentials in vivo, and display chromatin profiles similar to developing RGCs.

[0001] This application claims benefit of U.S. provisional patent application No. 63/362,361, filed Apr. 1, 2022, the entire contents of which are incorporated by reference into this application.

### ACKNOWLEDGEMENT OF GOVERNMENT SUPPORT

[0002] This invention was made with government support under Grant No. R01 EY021482, awarded by the National Institutes of Health (NIH). The government has certain rights in the invention.

### REFERENCE TO A SEQUENCE LISTING

[0003] The content of the XML file of the sequence listing named “UW77_seq”, which is 666 kb in size, created on Mar. 30, 2023, and electronically submitted herewith the application, is incorporated herein by reference in its entirety.

### BACKGROUND

[0004] Neurodegenerative disorders of the eye result in blindness because the mammalian nervous system lacks a regenerative capacity. In other vertebrates, such as fish and amphibians, the retina is able to replace lost neurons and restore visual function. Müller glia (MG), the primary glial cell in the vertebrate retina, can serve as a source of neurogenic progenitors in regenerative species. However, in the mammalian retina, MG respond to retinal damage by undergoing an inflammatory response instead of a regenerative one.

[0005] There are numerous diseases that cause the loss of specific neuronal populations in the retina resulting in blindness. As such, there remains a need to stimulate regeneration in the human retina for the development of new types of regenerative therapies for patients.

### SUMMARY

[0006] Described herein are compositions, nucleic acid molecules and methods for inducing retinal regeneration and reprogramming of Müller glia (MG) into retinal ganglion cells in a subject. Examples provided herein show that the developmental retinal ganglion cell (RGC) transcription factors Pou4f2 and Islet1 increase the Ascl1-induced neurogenic capacity of MG. The combination of Ascl1, Pou4f2 and Islet1 stimulates MG to generate bipolar cells and RGC-like neurons. Likewise, the transcription factor Onecut1, which is expressed in developing retinal cells, but not in MG, induces MG to generate RCG-like cells. Additional transcription factors that can be used include Irx2, Irx5, Neurod2, Ebf1, and Tcf3. MG-derived RGCs can exhibit action potentials in vivo, and display chromatin profiles similar to developing RGCs.

[0007] Disclosed herein is a nucleic acid molecule comprising a nucleic acid sequence encoding a developmental retinal ganglion cell (RGC) transcription factor, wherein the RGC transcription factor is selected from the group consisting of Onecut1, Pou4f2, Islet1, Irx2, Irx5, Neurod2, Ebf1, and Tcf3, and combinations thereof. In some embodiments, the transcription factor is selected from Onecut1, Pou4f2, and Islet1, and combinations thereof. In some embodiments, the transcription factor is selected from Irx2, Irx5, Neurod2, Ebf1, and Tcf3, and combinations thereof. In some embodiments, the RGC transcription factor is Onecut1. In some embodiments, the RGC transcription factor comprises Pou4f2 and/or Islet1. In some embodiments, the RGC transcription factor comprises Irx2 and/or Neurod2.

[0008] In some embodiments, the nucleic acid sequence further comprises a nucleic sequence that encodes a proneural basic helix-loop-helix (bHLH) transcription factor. In some embodiments, the proneural bHLH transcription factor and the RGC transcription factor are expressed as a fusion protein. Representative examples of proneural bHLH transcription factors include, but are not limited to, Ascl1, Atonal7 (also known as Math5), Atoh1 (also known as Math1), Neurogenin-2, and Neuronal Differentiation 1 (Neurod1). In one embodiment, the nucleic acid molecule further comprises a nucleic acid sequence encoding Ascl1 and Atoh1. In another embodiment, the nucleic acid molecule further comprises a nucleic acid sequence encoding Ascl1 and Atoh7. In another embodiment, the nucleic acid molecule further comprises a nucleic acid sequence encoding Atoh1 and Atoh7. In another embodiment, the nucleic acid molecule further comprises a nucleic acid sequence encoding Ascl1, Atoh1 and Atoh7. In some embodiments, the nucleic acid molecule comprises a nucleic acid sequence encoding two, three, four, or all five of Ascl1, Atonal7, Atoh1, Neurogenin-2, and Neurod1.

[0009] In some embodiments, the nucleic acid comprises Pou4f2 and/or Islet1 and/or Ascl1. In some embodiments, the nucleic acid comprises Pou4f2, Islet1, and Ascl1.

[0010] In some embodiments, the nucleic acid sequence further comprises a promoter sequence in operable linkage with the nucleic acid sequence encoding the RGC transcription factor. In some embodiments, the promoter sequence does not naturally occur in operable linkage with the nucleic acid sequence encoding the RGC transcription factor. In some embodiments, the promoter sequence is for a gene specifically expressed in glial cells, such as RLBP1 or GLAST. In some embodiments, the promoter sequence is a HES1, RLBP1 or GLAST promoter. In some embodiments, the promoter sequence will precede an effector gene CRE or tTA that will drive transcription in an inducible manner. In one embodiment, the MG-specific promoter sequence is a Rbpl1 promoter sequence or a portion thereof. In other embodiments, the nucleic acid sequence comprises an IRES or 2A self-cleaving sites situated between the sequences encoding the transcription factors, for example, in a multicistronic or polycistronic configuration. In other embodiments, the nucleic acid sequence will comprise elements that respond to the presence of CRE or tTA, to trigger transcription of genes in an inducible manner. These elements include, but are not limited to, loxP, lox2272 and tetracycline response element (TRE).

[0011] Also provided is a composition comprising a nucleic acid molecule described herein. In some embodiments, the nucleic acid molecule is an mRNA. Such compositions can be formulated for delivery, optionally in the form of a vector. In some embodiments, the vector is a non-viral vector or a viral vector. In some embodiments, the viral vector is an adeno-associated viral (AAV) vector or a lentiviral vector. In some embodiments, the composition is formulated for administration to the retina. Examples of such administration include, but are not limited to, intravitreal or subretinal injection.

[0012] In some embodiments, the composition further comprises a histone deacetylase (HDAC) inhibitor (HDACi). Representative examples of the HDACi include, but are not limited to, trichostatin A (TSA), Istodax™ also known as (Pro)/romidepsin, Beleodaq™, also known as (Pro)/belinostat, Farydak™, also known as (Pro)/panobinostat, and Zolinza™, also known as (Pro)/vorinostat. Exemplary HDACi peptides include, without limitation, 16cyc-HxA, 16lin-HxA and 16KA (SEQ ID NO: 58-60).

[0013] Also disclosed herein is a method for inducing retinal regeneration, or a method for stimulating regeneration of a retinal ganglion cell by administering to a cell, e.g., an MG cell, a nucleic acid molecule comprising a nucleic acid sequence encoding a developmental retinal ganglion cell (RGC) transcription factor (TF). In certain embodiments the cell is in vitro or ex vivo. Exemplary RGC TFs include Onecut1, Pou4f2, Islet1, Irx2, Irx5, Neurod2, Ebf1, and Tcf3, and combinations thereof. In some embodiments, the transcription factor is selected from Onecut1, Pou4f2, and Islet1, and combinations thereof. In some embodiments, the transcription factor is selected from Irx2, Irx5, Neurod2, Ebf1, and Tcf3, and combinations thereof. In some embodiments, the RGC transcription factor is Onecut1. In some embodiments, the RGC transcription factor comprises Pou4f2 and/or Islet1. In some embodiments, the RGC transcription factor comprises Irx2 and/or Neurod2.

[0014] Also disclosed herein is a method for inducing retinal regeneration, or a method for stimulating regeneration of retinal ganglion cells, in a subject. These methods comprise administering to a retina of the subject a nucleic acid molecule comprising a nucleic acid sequence encoding a developmental retinal ganglion cell (RGC) transcription factor. Exemplary RGC TFs include Onecut1, Pou4f2, Islet1, Irx2, Irx5, Neurod2, Ebf1, and Tcf3, and combinations thereof. In some embodiments, the transcription factor is selected from Onecut1, Pou4f2, and Islet1, and combinations thereof. In some embodiments, the transcription factor is selected from Irx2, Irx5, Neurod2, Ebf1, and Tcf3, and combinations thereof. In some embodiments, the RGC transcription factor is Onecut1. In some embodiments, the RGC transcription factor comprises Pou4f2 and/or Islet1. In some embodiments, the RGC transcription factor comprises Irx2 and/or Neurod2.

[0015] In some embodiments, the nucleic acid molecule further comprises a nucleic sequence that encodes a proneural basic helix-loop-helix (bHLH) transcription factor, as described herein. In some embodiments, the nucleic acid molecule comprises a first nucleic acid molecule encoding a proneural bHLH transcription factor, and a second nucleic acid molecule encoding a RGC transcription factor. In some embodiments, the nucleic acid molecule is administered in the form of a composition. In some embodiments, the administering comprises a first administration of composition comprising a first nucleic acid molecule encoding a proneural bHLH transcription factor, and a second administration at a subsequent time point of a composition comprising a second nucleic acid molecule encoding a RGC transcription factor selected from the group consisting of Onecut1, Pou4f2, Islet1, Irx2, Irx5, Neurod2, Ebf1, and Tcf3, and combinations thereof. In some embodiments, the transcription factor is selected from Onecut1, Pou4f2, and Islet1, and combinations thereof. In some embodiments, the transcription factor is selected from Irx2, Irx5, Neurod2, Ebf1, and Tcf3, and combinations thereof. In some embodiments, the RGC transcription factor is Onecut1. In some embodiments, the RGC transcription factor comprises Pou4f2 and/or Islet1. In some embodiments, the RGC transcription factor comprises Irx2 and/or Neurod2. In some embodiments, the proneural bHLH transcription factor and the RGC transcription factor are administered as a fusion protein. In some embodiments, the first and/or second nucleic acid molecule is an mRNA.

[0016] In additional embodiments, the nucleic acid molecules and methods disclosed herein stimulate production of functional RGCs from reprogrammed MG. In another embodiment, the number of the MG-derived functional RGCs is increased. In another embodiment, the number of functional RGCs is increased by 40%. In another embodiment, the subject is treated for retinal disease, damage or degeneration in the retina. In another embodiment, the subject is an adult. In another embodiment, a vector comprises the nucleic acid molecule. In one embodiment, the vector is a non-viral vector or a viral vector, and the viral vector is an adeno-associated viral (AAV) vector or a lentiviral vector. In an additional embodiment, a promoter sequence is in operable linkage with the nucleic acid encoding the developmental RGC transcription factor. In one embodiment, the promoter is a Cre-inducible or tTA-inducible or MG-specific promoter. In one embodiment, administering to the retina is intravitreal or subretinal injection.

[0017] Also provided herein are methods for inducing retinal regeneration comprising administering to a subject a composition as described herein. In some embodiments, the methods are effective to increase the number of Müller glial-derived RGCs, to induce Müller glial cells to enter the mitotic cell cycle, and/or to generate new RGCs. In some embodiments of the method, the number of RGCs increases by at least 40% relative to a baseline level or other reference amount representative of an untreated retina. In some embodiments, the number of RGCs increases by 10%, 20%, 25%, 50%, 100%, 150%, 200%, or more.

[0018] The subject in the methods disclosed herein is typically a mammal, such as a human or veterinary subject. In one embodiment, the subject is an adult. The subject, in some embodiments, has a retinal degenerative disease. Examples of such retinal degenerative diseases include, but are not limited to, Age-related macular degeneration, glaucoma, ischemia, central retinal arterial occlusion and inherited retinal diseases, such as Retinitis Pigmentosa or Usher's syndrome.

[0019] Reprogramming of MG and regeneration of retinal neurons is particularly important for developing therapeutic products and methods for a range of degenerative ocular diseases such as, for example, and without limitation, retinal degeneration caused by diabetic retinopathy, glaucoma, and age-related macular degeneration. One such retinal degenerative disease is known as central retinal artery occlusion (CRAO), wherein blood flow through the central retinal artery is blocked or occluded often resulting in loss of vision. CRAO is caused by thromboembolus, carotid artery atherosclerosis, giant cell arteritis, aneurysms or arterial spasms. Current treatment paradigms for many of these types of degenerative diseases of the retina, particularly for CRAO, show little to no definitive improvement in outcomes. Another indication might be paracentral acute middle maculopathy, from vein occlusion (CRVO) or other causes that leads to inner retinal thinning and vision loss.

### BRIEF DESCRIPTION OF THE DRAWINGS

[0020] FIGS. 1A-1H Pou4f2 and/or Islet1 stimulate regeneration of RGC-like neurons. (1A) Schematic depicting the transgenic constructs used to induce Ascl1 and Pou4f2/Islet1 specifically in MG. Pou4f2/Islet1 is surrounded by mutually exclusive floxed sites, leading to expression of Pou4f2, Islet1, or both in the presence of active Cre. (1B) Experimental paradigm to induce retinal regeneration in adult mice. Tamoxifen (TMX). (1C) Representative sections of the retina after intravitreal NMDA damage, showing transgenic expression of Pou4f2/Bm3 and/or Islet1 in GFP+ lineage-traced MG. DAPI, 4′,6-diamidino-2-phenylindole. (1D) Quantification of the percent of transgene-expressing MG that express Pou4f2, Islet1, or both. (1E and 1F) Representative sections showing MG-derived neurons after the regeneration paradigm expressing HuC/D. (1G) Quantification of the percent of GFP+ MG-derived neurons that express either HuC/D or Otx2. (1H) Examples of MG-derived neurons expressing Otx2. Significance of difference was determined using an unpaired t test (asterisk=p<0.0001); dots represent individual animals. Scale bars, 50 μm. ONL, outer nuclear layer; INL, inner nuclear layer; GCL, ganglion cell layer. Mouse schematic was made with Biorender.com.

[0021] FIGS. 2A-2F. Islet1+Pou4f2+Ascl1 (IPA)-stimulated MG-derived neurons display complex neuronal morphology. (A) Retinal whole mounts stained for GFP (MG-derived cells) and Brn3. (B to E) Examples of the morphology of GFP+MG-derived cells. (F) MG-derived (GFP+) cell with complex neurites colabeled with Bm3. Scale bars, 50 μm.

[0022] FIGS. 3A-3G. scRNA-seq analysis of Pou4f2/Islet1-stimulated neurons reveals molecular characteristics of RGCs. (A) UMAP plot for FACS-sorted MG-derived cells after the IPA regeneration paradigm combined with a previous scRNA-seq dataset where Ascl1 only was used. (B) Feature plots highlight the major clusters of MG (Rlbp1), neurogenic transition (Bhlhe22), bipolars (Cabp5), photoreceptors (Rcvm), and RGC-like cells (Elavl4 and Sox11). (C) The distribution of cells from each treatment projected onto a split UMAP plot. Donut plots represent the percent each cluster comprises of the dataset. (D) Heatmap comparing scRNA-seq datasets of Ascl1 only versus IPA treatment. Selected genes are depicted that are associated with RGCs. (E) Retinal sections stained for MG-derived cells (GFP) with Satb1 (red), and quantifications show the percent of GFP+ cells that are Satb1+. (F) Retinal sections stained for MG-derived cells (GFP) with Calretinin (red), and quantifications show the percent of GFP+ cells that are Calretinin+. (G) UMAP of IPA-derived neurons integrated with scRNA-seq of E14 mouse retina from Clark et al. (21), revealing that IPA neurons cluster similarly to immature RGCs. Scale bars, 50 μm.

[0023] FIGS. 4A-4M. Islet1 and Pou4f2 coinduction stimulates RGC-like neurons from MG in vitro. (A) Schematic of transgenic construct to induce IPA in all primary MG in vitro by doxycycline. (B) Paradigm for inducing Ascl1-mediated neurogenesis in vitro. (C to E) Representative images of EdU+MG-derived neurons expressing neuronal markers.) (C) EdU+ (white) MG-derived cell expressing Tuj1 (red). (D) MG-derived neuron expressing EdU (white), Neurofilament M (NFM; red), and the GFP transgene reporter (GFP). ((E) MG-derived neuron expressing Calbindin (red) colabeling with EdU (white), DAPI, and GFP. (F to H) UMAP plots of cultured MG reprogrammed with Ascl1 (F) and IPA (G), integrated with cells from in vivo IPA regeneration model (H) as reference. (I) Stacked bar plot showing composition of neuronal clusters in each sample. BC, bipolar cell. (J) Feature plots highlighting differentially expressed genes in neuronal clusters of either reprogramming strategy. (K) Highlighted cells of the Ascl1 and IPA datasets used for downstream DGE analysis in (L). (M) Heatmap of genes differentially expressed in either the Ascl1 or IPA condition. WT, untreated cultured MG included for baseline values. Statistics for differential gene analysis: Wilcoxon Mann-Whitney test for significance (P<0.05). Scale bars, 50 μm.

[0024] FIGS. 5A-5D. Physiological profiling of IPA-induced neurons. (A) Summary of electrical properties of cells in this study compared to endogenous neurons, endogenous glia, and MG-derived neurons from previous regeneration protocols (4, 5, 13). Resting potential and input resistance were estimated from current clamp recordings. (B) Examples of responses to current (left) and voltage (right) steps for three cells. (C) Three examples of cells that responded to light stimulus. (D) Examples of cells that displayed action potentials or similar events. The two left panels are responses to hyperpolarizing and depolarizing current steps from a cell that generated apparent Na+ spikes. The right two panels are responses from a cell that generated smaller discrete events, likely Ca2+ spikes.

[0025] FIGS. 6A-6J. scATAC reveals MG remodel chromatin to an RGC-like state in response to IPA treatment. (A) Combined UMAP of GFP+ sorted MG and their progeny from the in vivo regeneration paradigm with Ascl1-only (B) or IPA treatment (C). (D) Coverage plots for known marker genes used to identify clusters. (E and F) chromVAR scores of Otx2 and Pou4f2 to highlight differential accessibility of their respective motifs. (G) Scatterplot comparing accessible motifs in E14 RGCs versus IPA-induced RGCs. (H) Top “GO biological process” results for peaks specific to E14 RGCs compared to IPA-derived RGC-like neurons. (1) Heatmap of the chromVAR activity scores of the top variable motifs for TFs found on the pseudotime lineage of E14 progenitor cells to RGCs. (J) Heatmap of the same chromVAR activity scores of the E14 motifs plotted on pseudotime from MG to RGC-like neuron after IPA treatment. (K) Retinal sections showing GFP+MG-derived cells costained with the MG nuclei marker Sox2 (red) and quantification of GFP+ cells expressing Sox2. Scale bars, 50 μm.

[0026] FIGS. 7A-7I. The addition of Atoh1 to the IPA paradigm facilitates transition from a progenitor state to a differentiated neuron. (A) Schematic of transgenic construct to express IPA with Atoh1 in MG. (B) Regeneration paradigm for inducing IPA:Atoh1 expression in MG in the damaged retina. (C) Representative immunofluorescence images of regenerated neurons from IPA:Atoh1 mice demonstrating MG-derived neurons (GFP+) are HuC/D+ and not Otx2+. (D) Integrated UMAP of FACS-sorted MG-derived cells after regeneration paradigm with either IPA:Atoh1 or IPA-only overexpression. Highlighted are the RGC-like cells from each dataset that were subsetted for further comparative analysis. (E) Scatterplot highlighting differentially expressed genes between the RGC-like cells of the IPA:Atoh1 and IPA-only regeneration paradigms. (F) GO analysis revealed that neurodevelopmental terms containing many retinal progenitor genes were down-regulated in the IPA:Atoh1 dataset versus IPA only. (G) Integrated UMAP of IPA:Atoh1 data as described above with previously generated Ascl1:Atoh1 dataset (13). Highlighting denotes RGC-like cells from each dataset compared in further analysis. (H) Scatterplot highlighting differentially expressed genes between the RGC-like cells of the IPA:Atoh1 and Ascl1:Atoh1 regeneration paradigms. (I) Bar plot of GO terms relating to neurite outgrowth enriched in the IPA:Atoh1 data. Known neuron projection genes listed are up-regulated with IPA:Atoh1 versus Ascl1:Atoh1.

[0027] FIGS. 8A-8C. A subset of IPA-derived neurons are derived from proliferating MG. (8A) Experimental paradigm to label diving cells during the regeneration experiment described in FIG. 1. (8B) Representative sections showing MG-derived cells (GFP+) that previously underwent cell division (EdU+). (8C) Representative image showing some MG-derived neurons (GFP+/HuC/D+, upper panels) are the result of proliferating MG (EdU+ lower left panel). Scale bars are 50 μm. Abbreviations: ONL, outer nuclear layer, INL, inner nuclear layer, GCL, ganglion cell layer.

[0028] FIGS. 9A-9E. IPA-treatment is most effective at reprogramming MG if induced prior to injury. (9A) Experimental paradigm using the transgenic mouse described in FIG. 1 to test whether Islet1/Pou4f2/Ascl1 is able to reprogram MG in the absence of retinal injury. (9B) Representative pictures of GFP+MG showing no induction of the ganglion/amacrine marker HuC/D (upper right panel) or the bipolar marker Otx2 (lower right panel). (9C) Experimental paradigm to test whether induction of the IPA-factors after NMDA damage and TSA application can induce MG neurogenesis. (9D) Representative pictures of GFP+MG showing some co-labeling of the neuronal markers HuC/D (upper right) and Otx2 (lower right). (9E) Quantification of the percent of MG-derived cells that express HuC/D or Otx2 after IPA-induction prior to injury, after injury, or without injury. Scale bars are 50 μm.

[0029] FIGS. 10A-10E. scRNA-seq analysis showing Pou4f2 biases MG-production towards RGC-like neurons. (10A) UMAPs of integrated IPA and Ascl1-only reprogrammed MG highlighting cells expressing either Isl1, Pou4f2, or the combination of both. (10B) Stacked bar graph quantifying the percent of Islet1-only, Pou4f2-only, or Islet1/Pou4f2 double-positive cells that end up as MG-derived bipolars or RGC-like neurons. (10C) Feature plots highlighting Ascl1-expressing cells which get downregulated as they differentiate into bipolar neurons (Otx2+) or RGC-like neurons (Elavl4+). (10D) Heatmap of the top 40 differentially expressed genes between MG and MG-derived neurons found in the GO-terms “axon guidance”, “axonogenesis”, and “axon outgrowth”. (10E) Feature plots of prediction scores from Seurat's label transfer using a reference dataset of randomly sampled cells of each major retinal neuron class and MG, subsetted from mouse retinal development scRNA-seq data²³.

[0030] FIGS. 11A-11D. MG-derived RGCs are a stable population overtime. (11A) Combined UMAP of IPA-treated MG from a three and six week end point. (11B) Split UMAP showing the distribution of cells in the UMAP in (a) from each time point. (11C) Stacked bar graph showing the percentages of each cluster of MG and MG-derived neurons from the three week and six week time point. (11D) Analysis of cell death genes found in MG-derived RGC-like neurons. These data show that cell death genes are not significantly increased in MG-derived RCSs from this 3 to 6 week survival period.

[0031] FIGS. 12A-12E. MG from IPA mice express reprogramming factors. (12A) Immunofluorescence of IPA MG treated with doxycycline for 5 days showing Ascl1-IRES-GFP, Brn3, and Isl1 co-labeling in most cells. (12B) UMAP of untreated cultured MG with glial and neuronal cell populations labeled. (12C) Markers of MG and various retinal neurons reveal a small population of bipolar and amacrine cells survived dissociation. (12D) UMAP of integrated datasets from IPA overexpression in vivo and in vitro, with Ascl1 overexpression in vitro. (12E) Expression of melanopsin (Opn4) in three datasets featured in (12D). Scale bars are 50 μm. Abbreviations: MG, Müller glia; AC, amacrine cells; BC, bipolar cells; PR, photoreceptors; RGC, retinal ganglion cells.

[0032] FIGS. 13A-13F. scATAC-seq of the E14 embryonic mouse retina. (13A) UMAP plot of scATAC-seq from E14 embryonic mouse retina. Chromvar scores show the motif accessibility used to identify the clusters of progenitors (13B, Sox2), retinal ganglion cells (13C, Pou4f2), cones (13D, Otx2), and neurogenic precursors (13E, Ascl1). (13F) Pseudotime subset of the transition of retinal progenitor cells to retinal ganglion cells that is further analyzed in FIG. 6.

[0033] FIGS. 14A-14H. The addition of Atoh1 to IPA significantly induces MG-derived RGC-like cells and does not require retinal damage. (14A) Transgenic mouse construct used for induction of Ascl1, Atoh1, Pou4f2, and Islet1. (14B) Paradigm to assay whether induction of all four transcription factors can induce MG-neurogenesis in the absence of retinal injury. (14C) Representative section of a retina after IPAA treatment showing MG-derived (GFP+) cells express the neuronal marker HuC/D. (14D) Quantification of the percent of MG-derived cells that express the RGC-like marker HuC/D or the bipolar marker Otx2 after IPAA treatment without injury. (14E-14H) Violin plots of markers used to define clusters, and bar plots showing cluster composition of IPA-IPA:Atoh1 (14E-14F) and Ascl1:Atoh1-IPA:Atoh1 (14G-14H) integrated scRNAseq data.

[0034] FIG. 15. Promotion of RGC production using transcription factors specific to developing retinal cells. Lentiviruses were used to induce the expression of several transcription factors that are expressed in developing retinal cells, but not in Müller glia. The Müller glia were grown in cell culture and infected with the viruses. The cells were then cultured for 5-7 days and subsequently processed for single cell RNAseq to determine their fates. Of all the factors tested, Onecut1 (arrow) was able to induce the Müller glia to generate new cells with the characteristic gene expression of RGCs.

[0035] FIG. 16. Promotion of RGC production using transcription factors specific to developing retinal cells. Onecut1 expression (as in FIG. 15) induced Müller glia to generate new cells with the characteristic gene expression of RGCs, including Nefm, Nefl, Ebf1 and Gap43.

[0036] FIGS. 17A-17C. AAV delivered reprogramming transcription factors can induce neurogenesis. HuC/D+ neurons lineage was traced from MG by tdTomato. (17A) AAV design using Atoh1. (17B) Protocol for lineage tracing. (17C) Immunofluorescent demonstration of successful delivery of reprogramming transcription factors resulting in HuC/D+ neurons reprogrammed from MG cells.

[0037] FIG. 18. Reprogramming efficiency of lineage-traced MG. Bar graph showing that both Atoh1 and Atoh7 delivered by AAV can induce HuC/D+ neurons. Atoh1 and Atoh7 are about the same in efficiency. AAV delivery of reprogramming factors under these conditions was much less efficient than transgenic expression.

[0038] FIG. 19. Irx2 and Neurod2 promote axon growth in IPA reprogrammed MG.

[0039] FIGS. 20A-20D. Human Muller glia generated in vitro from fetal retina or pluripotent stem cells using retinospheres and retinal organoids. (20A) Schematic of Embryonic Stem cell (ESC) differentiation protocol to generate retinal organoids (RO). (20B) Images of MG development in retinal organoids over time labeled with RLBP1 and SOX2. (20 C) Upper panel shows the schematic protocol for the generation of retinospheres (RS), lower panel shows images of retinospheres made from several fetal retinas and cultured for various times as labeled. (20D) Characterization of the MG in RS with RLBP1, VSX2, SOX9, SOX2 and GFAP.

[0040] FIGS. 21A-21B. Protocol to generate dissociated human Muller glia cultures in vitro.

[0041] FIGS. 22A-22E. Ascl1 promotes neurogenesis in human Muller glia. (22A) Protocol for delivery of GFP into dissociated cells. (22B-22E) These neurons express some pan neuronal markers such as DCX and TUJ1, but are not mature.

[0042] FIG. 23. Characterization of ShH10 capsid and RLBP promoter in NHP dissociated Muller glia culture.

[0043] FIG. 24. HES1 promoter as an alternative to RLBP1 promoter. Schematic illustration of a lentiviral construct containing HES1 promoter driving the expression of EGFP.

[0044] FIGS. 25A-25D. Schematic illustration of the construction of a lentivirus containing the HES1 promoter driving the expression of EGFP (control) or driving the expression of the proneural factor ASCL1 and EGFP in Muller glia (25A). (25B-25D) Testing HES1 promoter for specificity of MG expression in human retinospheres (D132+77=D 209 at the infection date). GFP and HES1 are found in the same cells.

[0045] FIG. 26. HES1-promoter also directs expression in MG in adult NHP dissociated cultures.

### DETAILED DESCRIPTION

[0046] The molecules, compositions, and methods described herein are based on the surprising discovery that retinal ganglion-like cells can be regenerated in the damaged adult retina in vivo with targeted overexpression of developmental retinal ganglion cell transcription factors. As demonstrated herein, AAV vectors can deliver reprogramming transcription factors to Muller glia in vivo. While the rate of neurogenesis from AAV reprogrammed Muller glia is much less than that observed with transgenic reprogramming, other RGC transcription factors can increase specific RGC genes, and in some examples, can improve RGC axon growth. In addition, the studies described herein show that human Muller glia can be reprogrammed to generate neurons in dissociated cultures, and these human Muller glia can be derived from either retinal organoids or fetal human retina. This ability to reprogram Muller glia into specific types is particularly important for endogenous regeneration strategies because most blinding diseases are the result of deficits in a particular neuronal subtype. For example, glaucoma is primarily caused by the death of RGCs.

### Definitions

[0047] All scientific and technical terms used in this application have meanings commonly used in the art unless otherwise specified. As used in this application, the following words or phrases have the meanings specified.

[0048] As used herein, the term “comprising” is intended to mean that the compositions and methods include the recited elements, but do not exclude others. As used herein, the transitional phrase “consisting essentially of” (and grammatical variants) is to be interpreted as encompassing the recited materials or steps “and those that do not materially affect the basic and novel characteristic(s)” of the recited embodiment. Thus, the term “consisting essentially of” as used herein should not be interpreted as equivalent to “comprising.” “Consisting of” shall mean excluding more than trace elements of other ingredients and substantial method steps for administering the compositions disclosed herein. Aspects defined by each of these transition terms are within the scope of the disclosure herein.

[0049] As used herein, “retinal neuron” refers to any of the five types of neurons in the retina: photoreceptors, bipolar cells, ganglion cells, horizontal cells, and amacrine cells. In some particular embodiments, the retinal neurons are bipolar neurons, amacrine, horizontal, and ganglion cells.

[0050] As used herein, the terms “nucleic acid sequence” or “polynucleotide” refers to nucleotides of any length which are deoxynucleotides (i.e. DNAs), or derivatives thereof; ribonucleotides (i.e. RNAs) or derivatives thereof; or peptide nucleic acids (PNAs) or derivatives thereof. The terms include, without limitation, single-stranded, double-stranded, or multi-stranded DNA or RNA, genomic DNA, cDNA, DNA-RNA hybrids, oligonucleotides (oligos), or other natural, synthetic, modified, mutated or non-natural forms of DNA or RNA.

[0051] MicroRNAs, or “miRNAs”, or “miRs”, are short, non-coding RNAs that regulate gene expression by post-transcriptional regulation of target genes.

[0052] “Short hairpin RNAs” or “shRNAs” are synthetic or non-natural RNA molecules. shRNA refers to RNA with a tight hairpin turn used to silence (via RNA interference or RNAi) target gene expression in a cell. An shRNA is typically delivered via an expression vector such as a DNA plasmid or via viral vectors.

[0053] The term “vector” refers to, without limitation, a recombinant genetic construct or plasmid or expression construct or expression vector that retains the ability to infect and transduce non-dividing and/or slowly-dividing cells and integrate into the target cell's genome. The vector may be derived from or based on a wild-type virus. Aspects of this disclosure relate to an adeno-associated virus vector, an adenovirus vector, and a lentivirus vector.

[0054] The term “expression control element” as used herein refers to any sequence that regulates the expression of a coding sequence, such as a gene. Exemplary expression control elements include but are not limited to promoters, enhancers, microRNAs, post-transcriptional regulatory elements, polyadenylation signal sequences, and introns. Expression control elements may be, without limitation, constitutive, inducible, repressible, or tissue-specific. A “promoter” is a control sequence that is a region of a polynucleotide sequence at which initiation and rate of transcription are controlled. It may contain genetic elements at which regulatory proteins and molecules may bind such as RNA polymerase and other transcription factors. In some embodiments, expression control by a promoter is tissue-specific. An “enhancer” is a region of DNA that can be bound by activating proteins to increase the likelihood or frequency of transcription. Non-limiting exemplary enhancers and posttranscriptional regulatory elements include the CMV enhancer and WPRE.

[0055] The term “multicistronic” or “polycistronic” or “bicistronic” or tricistronic” refers to mRNA with multiple, i.e., double or triple coding areas or exons, and as such will have the capability to express from mRNA two or more, or three or more, or four or more, etc., proteins from a single construct. Multicistronic vectors simultaneously express two or more separate proteins from the same mRNA. The two strategies most widely used for constructing multicistronic configurations are through the use of 1) an IRES or 2) a 2A self-cleaving site. An “IRES” refers to an internal ribosome entry site or portion thereof of viral, prokaryotic, or eukaryotic origin which are used within polycistronic vector constructs. In some embodiments, an IRES is an RNA element that allows for translation initiation in a cap-independent manner. The term “self-cleaving peptides” or “sequences encoding self-cleaving peptides” or “2A self-cleaving site” refer to linking sequences which are used within vector constructs to incorporate sites to promote ribosomal skipping and thus to generate two polypeptides from a single promoter, such self-cleaving peptides include without limitation, T2A, and P2A peptides or sequences encoding the self-cleaving peptides.

[0056] The term “substantially complementary,” when used to define either amino acid or nucleic acid sequences, means that a particular sequence, for example, an oligonucleotide sequence, is substantially complementary to the sequence referenced. As such, typically the sequences will be highly complementary to the “target” sequence, and will have no more than 1, 2, 3, 4, 5, 6, 7, 8, 9, or 10 base mismatches throughout the sequence. In many instances, it may be desirable for the sequences to be exact matches, i.e. be completely complementary to the sequence to which the nucleic acid specifically binds, and therefore have zero mismatches along the complementary stretch. As such, highly complementary sequences will typically bind quite specifically to the target sequence region and will therefore be highly efficient in reducing, and/or even inhibiting the biological activity of the target sequence.

[0057] Substantially complementary nucleic acid sequences will be greater than about 80 percent complementary (or ‘% exact-match’) to the corresponding target sequence to which the nucleic acid specifically binds, and will, more preferably be greater than about 85 percent complementary to the corresponding target sequence to which the nucleic acid specifically binds. In certain aspects, as described above, it will be desirable to have even more substantially complementary nucleic acid sequences for use in the practice of the invention, and in such instances, the nucleic acid sequences will be greater than about 90 percent complementary to the corresponding target sequence to which the nucleic acid specifically binds, and may in certain embodiments be greater than about 95 percent complementary to the corresponding target sequence to which the nucleic acid specifically binds, and even up to and including 96%, 97%, 98%, 99%, and even 100% exact match complementary to the target to which the designed nucleic acid specifically binds.

[0058] “Homology” or “identity” or “similarity” refers to sequence similarity between two peptides or between two nucleic acid molecules. Homology can be determined by comparing a position in each sequence which may be aligned for purposes of comparison. When a position in the compared sequence is occupied by the same base or amino acid, then the molecules are homologous at that position. A degree of homology between sequences is a function of the number of matching or homologous positions shared by the sequences. An “unrelated” or “non-homologous” sequence shares less than 40% identity, or alternatively less than 25% identity, with one of the sequences of disclosed herein.

[0059] Percent similarity or percent complementary of any of the disclosed sequences may be determined, for example, by comparing sequence information using the GAP computer program, version 6.0, available from the University of Wisconsin Genetics Computer Group (UWGCG). The GAP program utilizes the alignment method of Needleman and Wunsch (1970). Briefly, the GAP program defines similarity as the number of aligned symbols (i.e., nucleotides or amino acids) which are similar, divided by the total number of symbols in the shorter of the two sequences. The preferred default parameters for the GAP program include: (1) a unary comparison matrix (containing a value of 1 for identities and 0 for non-identities) for nucleotides, and the weighted comparison matrix of Gribskov and Burgess (1986), (2) a penalty of 3.0 for each gap and an additional 0.10 penalty for each symbol in each gap; and (3) no penalty for end gaps.

[0060] “Nucleotide sequence” refers to a heteropolymer of deoxyribonucleotides, ribonucleotides, or peptide-nucleic acid sequences that may be assembled from smaller fragments, isolated from larger fragments, or chemically synthesized de novo or partially synthesized by combining shorter oligonucleotide linkers, or from a series of oligonucleotides, to provide a sequence which is capable of specifically binding to a target molecule and acting as an antisense construct to alter, reduce, or inhibit the biological activity of the target.

[0061] As used herein, “directed against”, in the context of antisense oligonucleotides, means the antisense oligonucleotide binds to a target miRNA and blocks or suppresses activity of the target.

[0062] As used herein, the terms “protein”, “peptide”, and “polypeptide” refer to amino acid subunits, amino acid analogs, or peptidomimetics. The subunits may be linked by peptide bonds. In another aspect, the subunit may be linked by other bonds, e.g., ester, ether, etc. As used herein the term “amino acid” refers to either natural and/or unnatural or synthetic amino acids.

[0063] As used herein, the term “recombinant expression system” or “recombinant expression vector” refers to a genetic construct for the expression of certain genetic material formed by recombination.

[0064] The term “effective amount” or “therapeutically effective amount” or “prophylactically effective amount”, refer to an amount of an active agent described herein that is effective to provide the desired/intended result and/or biological activity. Thus, for example, in various embodiments, an effective amount of a composition described herein is an amount that is effective to result in regeneration of retinal neurons, and/or to improve or to ameliorate symptoms of and/or to treat retinal degenerative diseases.

[0065] When the disclosure herein relates to a small molecule, polypeptide, protein, polynucleotide, nucleic acid, oligonucleotide, antisense, or miRNA, an equivalent or a biologically equivalent of such is intended within the scope of this disclosure. As used herein, the term “biological equivalent thereof” is intended to be synonymous with “equivalent thereof” when referring to a reference small molecule, polypeptide, protein, polynucleotide, nucleic acid, oligonucleotide, antisense, or miRNA even those reference molecules having minimal homology while still maintaining desired structure or functionality. Unless specifically recited herein, it is contemplated that any nucleic acid, polynucleotide, oligonucleotide, antisense, miRNA, polypeptide, or protein mentioned herein also includes equivalents thereof. For example, an equivalent intends at least about 70% homology or identity, or at least 80% homology or identity and alternatively, or at least about 85%, or alternatively at least about 90%, or alternatively at least about 95%, or alternatively 98% percent homology or identity and exhibits substantially equivalent biological activity to the reference protein, polypeptide or nucleic acid. Alternatively, when referring to polynucleotides, an equivalent thereof is a polynucleotide that hybridizes under stringent conditions to the reference polynucleotide or its complement.

[0066] In some embodiments disclosed herein, the polypeptide and/or polynucleotide sequences are provided herein for use in gene and protein transfer and expression techniques described below. Such sequences provided herein can be used to provide the expression product as well as substantially identical sequences that produce a protein that has the same biological properties. These “biologically equivalent” or “biologically active” or “equivalent” polypeptides are encoded by equivalent polynucleotides as described herein. They may possess at least 60%, or alternatively, at least 65%, or alternatively, at least 70%, or alternatively, at least 75%, or alternatively, at least 80%, or alternatively at least 85%, or alternatively at least 90%, or alternatively at least 95% or alternatively at least 98%, identical primary amino acid sequence to the reference polypeptide when compared using sequence identity methods run under default conditions. Specific polynucleotide or polypeptide sequences are provided as examples of particular embodiments. Modifications may be made to the amino acid sequences by using alternate amino acids that have similar charge. Additionally, an equivalent polynucleotide is one that hybridizes under stringent conditions to the reference polynucleotide or its complement or in reference to a polypeptide, a polypeptide encoded by a polynucleotide that hybridizes to the reference encoding polynucleotide under stringent conditions or its complementary strand. Alternatively, an equivalent polypeptide or protein is one that is expressed from an equivalent polynucleotide.

[0067] “Hybridization” refers to a reaction in which one or more polynucleotides react to form a complex that is stabilized via hydrogen bonding between the bases of the nucleotide residues. The hydrogen bonding may occur by Watson-Crick base pairing, Hoogstein binding, or in any other sequence-specific manner. The complex may comprise two strands forming a duplex structure, three or more strands forming a multi-stranded complex, a single self-hybridizing strand, or any combination of these. A hybridization reaction may constitute a step in a more extensive process, such as the initiation of a PC reaction, or the enzymatic cleavage of a polynucleotide by a ribozyme.

[0068] Examples of stringent hybridization conditions include: incubation temperatures of about 25° C. to about 37° C.; hybridization buffer concentrations of about 6×SSC to about 10×SSC; formamide concentrations of about 0% to about 25%; and wash solutions from about 4×SSC to about 8×SSC. Examples of moderate hybridization conditions include: incubation temperatures of about 40° C. to about 50° C.; buffer concentrations of about 9×SSC to about 2×SSC; formamide concentrations of about 30% to about 50%; and wash solutions of about 5×SSC to about 2×SSC. Examples of high stringency conditions include: incubation temperatures of about 55° C. to about 68° C.; buffer concentrations of about 1×SSC to about 0.1×SSC; formamide concentrations of about 55% to about 75%; and wash solutions of about 1×SSC, 0.1×SSC, or deionized water. In general, hybridization incubation times are from 5 minutes to 24 hours, with 1, 2, or more washing steps, and wash incubation times are about 1, 2, or 15 minutes. SSC is 0.15 M NaCl and 15 mM citrate buffer. It is understood that equivalents of SSC using other buffer systems can be employed.

[0069] As used herein, “treating” or “treatment” of a retinal degenerative disease in a subject refers to (1) preventing the symptoms or disease from occurring in a subject that is predisposed or does not yet display symptoms of the disease; (2) inhibiting the disease or arresting its development; or (3) ameliorating or causing regression of the disease or the symptoms of the disease. As understood in the art, “treatment” is an approach for obtaining beneficial or desired results, including clinical results. For the purposes of the compositions, combination therapy, nucleic acid molecules, and methods disclosed herein for inducing neurogenesis from MG and/or generating functional neurons from MG, beneficial or desired results can include one or more, but are not limited to, alleviation or amelioration of one or more symptoms of retinal degeneration, diminishment of extent of a retinal degenerative condition (including a retinal degenerative disease), stabilized (i.e., not worsening) state of a retinal degenerative condition (including disease), delay or slowing of a retinal degenerative condition (including disease), progression, amelioration or palliation of a retinal degenerative condition (including disease), states of and remission of (whether partial or total) retinal degeneration, whether detectable or undetectable.

[0070] As used herein, the term “isolated” means that a naturally occurring DNA fragment, DNA molecule, coding sequence, or oligonucleotide is removed from its natural environment, or is a synthetic molecule or cloned product. Preferably, the DNA fragment, DNA molecule, coding sequence, or oligonucleotide is purified, i.e., essentially free from any other DNA fragment, DNA molecule, coding sequence, or oligonucleotide and associated cellular products or other impurities.

[0071] The term “cell” as used herein refers to either a prokaryotic or eukaryotic cell, optionally obtained from a subject or a commercially available source. Cells treated, transfected, transformed, or otherwise in contact with compositions and/or nucleic acid molecules disclosed herein, include without limitation, cells of a human, non-human animal, mammal, or non-human mammal, including without limitation, cells of murine, canine, or non-human primate species. Cells treated, transfected, transformed, or otherwise in contact with compositions and/or nucleic acid molecules disclosed herein are, without limitation, retinal cells, Müller glia (MG), and/or retinal neuronal cells such as retinal neurons, bipolar neurons, amacrine cells, horizontal cells, ganglion cells and/or glia. The term “Müller glial” cells “or “Müller glia” or “MG” refer to cells which are found in the vertebrate retina and are support cells for neurons. MG are the most common type of glial cells in the retina. While MG cell bodies are located in the inner nuclear layer of the retina, MG span across the entire retina.

[0072] As used herein, the term “subject” includes any human or non-human animal. The term “non-human animal” includes all vertebrates, e.g., mammals and non-mammals, such as non-human primates, horses, sheep, dogs, cows, pigs, chickens, and other veterinary subjects.

[0073] As used herein, “a” or “an” means at least one, unless clearly indicated otherwise.

[0074] As used herein, to “prevent” or “protect against” a condition or disease means to hinder, reduce or delay the onset or progression of the condition or disease.

[0075] The term “encode” as it is applied to nucleic acid sequences refers to a polynucleotide which is said to “encode” a polypeptide, an mRNA, or an effector RNA if, in its native state or when manipulated by methods well known to those skilled in the art, can be transcribed and/or translated to produce the effector RNA, the mRNA, or an mRNA that can for the polypeptide and/or a fragment thereof. The antisense strand is the complement of such a nucleic acid, and the encoding sequence can be deduced therefrom.

[0076] As used herein, the term “expression” or “gene expression” refers to the process by which polynucleotides are transcribed into mRNA and/or the process by which the transcribed mRNA is subsequently translated into peptides, polypeptides, or proteins. If the polynucleotide is derived from genomic DNA, expression may include splicing of the mRNA in a eukaryotic cell. The expression level of a gene may be determined by measuring the amount of mRNA or protein in a cell or tissue sample; further, the expression level of multiple genes can be determined to establish an expression profile for a particular sample.

[0077] As used herein, the term “functional” may be used to modify any molecule, biological, or cellular material to intend that it accomplishes a particular, specified effect.

[0078] As used herein, the term “combined therapy” refers to two or more compositions and/or nucleic acid molecules, delivered in combination, for example and without limitation, sequentially, concurrently, simultaneously, and/or step-wise, in order to achieve a therapeutic effect.

[0079] The term “about,” as used herein when referring to a measurable value such as an amount, level or concentration, for example and without limitation, is meant to encompass variations of 20%, 10%, 5%, 1%, 0.5%, or even 0.1% of the specified amount, or fold differences in levels of a quantifiable comparison with a standard or control or reference material, such as 1-fold, 2-fold, 3-fold, 4-fold . . . 10-fold, 100-fold, etc. of the specified level of comparison.

[0080] In some embodiments, enhancing expression levels of the two or more proneural bHLH transcription factors, endogenous and/or exogenous, refers to an increase in the amount of expressed as compared to a control sample or explant levels of endogenous and/or exogenous Ascl1, and/or Atoh1, and/or Atoh7 such as, without limitation, untreated, or Ascl1 expression alone. In some embodiments, neurogenesis is increased and/or the production of functional neurons is increased as compared to a control. In some embodiments, expression levels and/or functional neurons are increased about 1.1 fold, about 1.2 fold, about 1.3 fold, about 1.4 fold, about 1.5 fold, about 1.6 fold, about 1.7 fold, about 1.8 fold, about 1.9 fold, about 2 fold, about 2.5 fold, about 3 fold, about 4 fold, about 5 fold, about 6 fold, about 7 fold, about 8 fold, about 9 fold, about 10 fold, about 20 fold, about 50 fold, about 100 fold, about 1000 fold, or about 10,000 fold relative to the control.

[0081] In some embodiments, the terms “reprogramming potentiator” or “reprogramming potentiating agent”, used herein interchangeably, refers to a small molecule, polypeptide, protein, polynucleotide, nucleic acid, oligonucleotide, antisense, miRNA, or an equivalent or a biologically equivalent thereof which assists in the process of stimulating and/or boosting neurogenesis from MG in a manner such that functional neurons from the MG are produced. In one embodiment, one or more reprogramming potentiators assist in the process of stimulating neurogenesis and producing functional neurons from MG by inhibiting the HDAC pathway. In another embodiment, one or more reprogramming potentiators assist in the process of stimulating neurogenesis and producing functional neurons from MG by inhibiting the Jak/STAT pathway. In another embodiment, one or more reprogramming potentiators assist in the process of stimulating neurogenesis and producing functional neurons from MG by inhibiting the HDAC+Jak/STAT pathways. In another embodiment, one or more reprogramming potentiators assist in the process of stimulating neurogenesis and producing functional neurons from MG by enhancing and/or increasing endogenous and/or exogenous Ascl1 expression levels. See also our previous work in WO2019/210320 and WO02020/223308, each of which is incorporated herein by reference in its entirety.

[0082] The terms “acceptable,” “effective,” or “sufficient” when used to describe the selection of any components, ranges, dose forms, etc. disclosed herein intend that said component, range, dose form, etc. is suitable for the disclosed purpose.

[0083] The term “adeno-associated virus” or “AAV” as used herein refers to a member of the class of viruses associated with this name and belonging to the genus dependoparvovirus, family Parvoviridae. Multiple serotypes of this virus are known to be suitable for gene delivery; all known serotypes can infect cells from various tissue types. At least 11 or 12, sequentially numbered, are disclosed in the prior art. Non-limiting exemplary serotypes useful in the methods disclosed herein include any of the 11 or 12 serotypes, e.g., AAV2, AAV5, and AAV8, or engineered serotypes, e.g. AAV-SHH10 and AAV-7m8. The AAV structural particle is composed of 60 protein molecules made up of VP1, VP2, and VP3. Each particle contains approximately 5 VP1 proteins, 5 VP2 proteins and 50 VP3 proteins ordered into an icosahedral structure.

### Nucleic Acid Molecules and Compositions

[0084] Provided are compositions and/or nucleic acid molecules for retinal regeneration, the potentiation of retinal regeneration, stimulation of regeneration of retinal ganglion cells, restoration of vision, and for treatment of retinal degenerative disease, damage, or injury.

[0085] Such nucleic acid molecules may be delivered by viral or non-viral means. One example of viral delivery is adeno-associated virus (AAV). Other examples include retrovirus and lentivirus delivery. One example of a non-viral method of delivery is cell penetrating peptide (CPP). Polynucleotide constructs may also be modified, such as through chemical modification, to improve their stability and/or suitability for delivery. In some embodiments, the oligonucleotide is modified by locked nucleic acids and/or phosphorothioate linkages. In some embodiments, a delivery system is selected for improved bioavailability, such as PEGylated liposomes, lipidoids, or biodegradable polymers, as examples.

[0086] In some embodiments, the composition further comprises one or more additional potentiating or therapeutic agents, including, for example, reprogramming potentiating agents. In some embodiments, the composition is free of reprogramming potentiating agents. Optionally, a composition comprising one or more small molecule reprogramming potentiating agents can be administered sequentially or concurrently with the nucleic acid molecules disclosed herein. In another embodiment, one or more protein/peptide or miR-based reprogramming potentiators can be incorporated into the nucleic acid molecules disclosed herein. Such one or more reprogramming potentiators are selected from HDACi, STATi, Jak/STATi and RNAi-based Ascl1 activators. See also our previous work in WO2019/210320 and WO2020/223308, each of which is incorporated herein by reference in its entirety.

[0087] In one embodiment, the HDAC signaling pathway inhibitor is selected from the group consisting of peptidomimetics, small molecule inhibitors, oligonucleotides, peptides and proteins. Representative examples of small molecule HDACi include, but are not limited to, trichostatin A (TSA), Istodax™ also known as (Pro)/romidepsin, Beleodaq™, also known as (Pro)/belinostat, Farydak™, also known as (Pro)/panobinostat, and Zolinza™, also known as (Pro)/vorinostat, Quisinostat, Abexinostat, Givinostat, Resminostat, Phenylbutyrate, Valproic Acid, Depsipeptide, Entinostat, Mocetinostat, and Tubastatin A. Exemplary HDACi peptides are, without limitation, 16cyc-HxA, 16lin-HxA and 16KA.

[0088] In some embodiments, the inhibitor, mimic, activator, or antagomir is an oligonucleotide or a nucleotide sequence. The invention thus provides nucleotide constructs for use in the compositions or combined therapy or nucleic acid molecules and methods described herein.

[0089] The reprogramming potentiating agents, in some embodiments, are selected from one or more STAT signaling pathway inhibitors; and one or more Ascl activators such as, without limitation, miR-25 and/or miR-124; and one or more let-7 family inhibitors.

[0090] Optionally, provided herein is a composition comprising any one or more of the combined therapy of RNAi-based Ascl1 activators and/or HDACi+STATi, and/or a nucleic acid sequence encoding the developmental RGC transcription factors or a vector comprising the nucleic acid sequences disclosed herein, and a carrier. In some embodiments, the carrier is a pharmaceutically acceptable carrier.

[0091] An exemplary nucleic acid sequence encoding human Onecut1 can be found at NCBI Reference Sequence number NC_000015.10 (SEQ ID NO: 1). An exemplary nucleic acid sequence encoding human Pou4f2 can be found at NCBI Reference Sequence number NC_000004.12 (SEQ ID NO: 3). An exemplary nucleic acid sequence encoding human Islet1 can be found at NCBI Reference Sequence number NC_000005.10 (SEQ ID NO: 5). An exemplary nucleic acid sequence encoding human Irx2 can be found at NCBI Reference Sequence number NC_000005.10 (SEQ ID NO: 8). The mouse version of Irx2 used in the Examples herein can be found at NCBI Reference Sequence: NM_010574.4 (SEQ ID NO: 64; encoding the amino acid sequence of SEQ ID NO: 65). An exemplary nucleic acid sequence encoding human Irx5 can be found at NCBI Reference Sequence number NC_000016.10 (SEQ ID NO: 13). The mouse version of Irx5 used in the Examples herein can be found at NCBI Reference Sequence: NM_018826.2 (SEQ ID NO: 66; encoding the amino acid sequence of SEQ ID NO: 67). An exemplary nucleic acid sequence encoding Neurod2 can be found at NCBI Reference Sequence number NC_000017.11 (SEQ ID NO: 17). An exemplary nucleic acid sequence encoding human Ebf1 can be found at NCBI Reference Sequence number NC_000005.10 (SEQ ID NO: 19). The mouse version of Ebf1 used in the Examples herein can be found at NCBI Reference Sequence: NM_001290709.1 (SEQ ID NO: 68; encoding the amino acid sequence of SEQ ID NO: 69). An exemplary nucleic acid sequence encoding human Tcf3 can be found at NCBI Reference Sequence number NC_000019.10 (SEQ ID NO: 48). The mouse version of Tcf3 used in the Examples herein can be found at NCBI Reference Sequence: NM_001164147.2 (SEQ ID NO: 70; encoding the amino acid sequence of SEQ ID NO: 71). This mouse sequence can be used to guide the selection of a corresponding human or humanized Tcf3.

[0092] An exemplary nucleic acid sequence encoding human Ascl1 can be found at NCBI Reference Sequence number NG_008950.1 (SEQ ID NO: 50). In another embodiment disclosed herein is a nucleic acid sequence encoding a human Ascl1 amino acid sequence or portion thereof of UniProtKB/Swiss-Prot: P50553.2 (SEQ ID NO: 51). Ascl1 homologues, e.g., derived from species such as murine, canine, equine, are included herein, without limitation.

[0093] The Protein Atonal Homolog 1 (Atoh1) is a proneural member of the family of bHLH transcription factors. The protein activates a different E box than the Ascl1 gene. An exemplary nucleic acid sequence encoding human Atoh1 can be found at NCBI Reference Sequence number NM_005172.1 (SEQ ID NO: 52). In another embodiment disclosed herein is a nucleic acid sequence encoding a human Atoh1 amino acid sequence or portion thereof of NP_005163.1 (SEQ ID NO: 53). Atoh1 homologs, orthologs and/or paralogs, e.g., derived from species such as murine, canine, equine, are included herein, without limitation.

[0094] The Atoh7 family bHLH transcription factor 7 (Atoh7) gene encodes a proneural member of the basic helix-loop-helix (BHLH) family of transcription factors. An exemplary nucleic acid sequence encoding human Atoh7 can be found at NCBI Reference Sequence number NM_008553.4 (SEQ ID NO: 54). In another embodiment disclosed herein is a nucleic acid sequence encoding a human Atoh7 amino acid sequence or portion thereof of NP_660161.1 (SEQ ID NO: 55). Atoh7 homologs, orthologs, and/paralogs, e.g., derived from species such as murine, canine, equine, are included herein, without limitation. An exemplary nucleic acid sequence encoding Neurogenin-2 (also known as NEUROG2 and NGN-2) can be found at NCBI Reference Sequence number NM_024019. An exemplary nucleic acid sequence encoding Neurod1 can be found at NCBI Reference Sequence number KR709666.

[0095] Exemplary nucleic acid sequences of the Ascl1, Atoh1, and/or Atoh7 or other proneural bHLH transcription factor for use herein include, without limitation, portions thereof of the corresponding sequences of Ascl1, Atoh1, and/or Atoh7, for the purposes of configurating multicistronic, bicistronic, and/or tricistronic constructs, plasmids, and/or expression vectors. It is understood that portions of the sequences referenced herein can be selected for use, wherein the selected portions are sufficient to encode the recited transcription factor(s) and/or other elements.

[0096] Exemplary sources for the promoter sequence can be found in HES1 (SEQ ID NO: 56), RLBP1 (SEQ ID NO: 57), or GLAST (also known as SL1A3; SEQ ID NOs: 61-63; see NCBI Reference Sequence Number NM_004172).

### Viral Vectors

[0097] In some embodiments, the vector disclosed herein is a viral vector. In some embodiments, the vector is an adenoviral vector, an adeno-associated viral (AAV) vector, or a lentiviral vector. In some embodiments, the vector is a retroviral vector, an adenoviral/retroviral chimera vector, a herpes simplex viral I or II vector, a parvoviral vector, a reticuloendotheliosis viral vector, a polioviral vector, a papillomaviral vector, a vaccinia viral vector, or any hybrid or chimeric vector incorporating favorable aspects of two or more viral vectors. In some embodiments, the vector further comprises one or more expression control elements operably linked to the polynucleotide. In some embodiments, the vector further comprises one or more selectable markers.

[0098] In some embodiments, the vector disclosed herein is an AAV vector with low toxicity. In some embodiments, the AAV vector does not incorporate into the host genome, thereby having a low probability of causing insertional mutagenesis. In some embodiments, the AAV vector can encode a range of total polynucleotides from 4.5 kb to 4.75 kb. In some embodiments, exemplary AAV vectors that may be used in any of the herein described compositions, systems, methods, and kits can include an AAV1 vector, a modified AAV1 vector, an AAV2 vector, a modified AAV2 vector, an AAV3 vector, a modified AAV3 vector, an AAV4 vector, a modified AAV4 vector, an AAV5 vector, a modified AAV5 vector, an AAV6 vector, a modified AAV6 vector, an AAV7 vector, a modified AAV7 vector, an AAV8 vector, an AAV9 vector, an AAV.rh10 vector, a modified AAV.rh10 vector, an AAV.rh32/33 vector, a modified AAV.rh32/33 vector, an AAV.rh43 vector, a modified AAV.rh43 vector, an AAV.rh64R1 vector, and a modified AAV.rh64R1 vector and any combinations or equivalents thereof.

[0099] In some embodiments, the vector disclosed herein is a lentiviral vector. In one embodiment, the lentiviral vector is an integrase-competent lentiviral vector (ICLV). In some embodiments, the lentiviral vector can refer to the transgene plasmid vector as well as the transgene plasmid vector in conjunction with related plasmids (e.g., a packaging plasmid, a rev expressing plasmid, an envelope plasmid) as well as a lentiviral-based particle capable of introducing exogenous nucleic acid into a cell through a viral or viral-like entry mechanism. Lentiviral vectors are well-known in the art. In some embodiments, exemplary lentiviral vectors that may be used in relation to any of the herein described compositions, nucleic acid molecules and/or methods, and can include a human immunodeficiency virus (HIV) 1 vector, a modified human immunodeficiency virus (HIV) 1 vector, a human immunodeficiency virus (HIV) 2 vector, a modified human immunodeficiency virus (HIV) 2 vector, a sooty mangabey simian immunodeficiency virus (SIV_{SM}) vector, a modified sooty mangabey simian immunodeficiency virus (SIV_{SM}) vector, a African green monkey simian immunodeficiency virus (SIV_{AGM}) vector, a modified African green monkey simian immunodeficiency virus (SIV_{AGM}) vector, a equine infectious anemia virus (EIAV) vector, a modified equine infectious anemia virus (EIAV) vector, a feline immunodeficiency virus (FIV) vector, a modified feline immunodeficiency virus (FIV) vector, a Visna/maedi virus (VNV/VMV) vector, a modified Visna/maedi virus (VNV/VMV) vector, a caprine arthritis-encephalitis virus (CAEV) vector, a modified caprine arthritis-encephalitis virus (CAEV) vector, a bovine immunodeficiency virus (BIV), or a modified bovine immunodeficiency virus (BIV).

[0100] In some embodiments of the compositions and/or nucleic acid molecules and/or methods of the disclosure, a vector of the disclosure is a viral vector. In some embodiments, the viral vector comprises a sequence isolated or derived from a retrovirus. In some embodiments, the viral vector comprises a sequence isolated or derived from a lentivirus. In some embodiments, the viral vector comprises a sequence isolated or derived from an adenovirus. In some embodiments, the viral vector comprises a sequence isolated or derived from an adeno-associated virus (AAV). In some embodiments, the viral vector is replication incompetent. In some embodiments, the viral vector is isolated or recombinant. In some embodiments, the viral vector is self-complementary.

[0101] In some embodiments of the compositions and/or nucleic acid molecules and/or methods of the disclosure, the viral vector comprises a sequence isolated or derived from an adeno-associated virus (AAV). In some embodiments, the viral vector comprises an inverted terminal repeat sequence or a capsid sequence that is isolated or derived from an AAV of serotype AAV1, AAV2, AAV3, AAV4, AAV5, AAV6, AAV7, AAV8, AAV9, AAV10, AAV11, or AAV12, or the vector and/or components are derived from a synthetic AAV serotype, such as, without limitation, Anc80 AAV (an ancestor of AAV 1, 2, 6, 8 and 9). In some embodiments, the viral vector is replication incompetent. In some embodiments, the viral vector is isolated or recombinant (rAAV). In some embodiments, the viral vector is self-complementary (scAAV).

[0102] In some embodiments of the compositions and methods of the disclosure, a vector of the disclosure is a non-viral vector. In some embodiments, the vector comprises or consists of a nanoparticle, a micelle, a liposome or lipoplex, a polymersome, a polyplex or a dendrimer.

[0103] In some embodiments, expression vector or viral vector disclosed herein is used to transfect, transform, or come in contact with a cell which is a eukaryotic cell. In some embodiments, the cell is an animal cell. In some embodiments, the cell is a mammalian cell. In some embodiments, the cell is a bovine, murine, feline, equine, porcine, canine, simian, or human cell. In particular embodiments, the cell is a retinal neuron or MG of an animal or mammal.

[0104] In some embodiments, a cell is a packaging cell or a producer cell for production of a viral particle.

[0105] In some embodiments, provided herein are viral particles comprising, consisting of, or consisting essentially of a vector comprising, consisting of, or consisting essentially of a polynucleotide sequence encoding a developmental RGC transcription factor and, optionally, an Ascl1 protein.

[0106] In general, methods of packaging genetic material such as RNA or DNA into one or more vectors is well known in the art. For example, the genetic material may be packaged using a packaging vector and cell lines and introduced via traditional recombinant methods.

[0107] In some embodiments, the packaging vector may include, but is not limited to retroviral vector, lentiviral vector, adenoviral vector, and adeno-associated viral vector. The packaging vector contains elements and sequences that facilitate the delivery of genetic materials into cells. For example, the retroviral constructs are packaging plasmids comprising at least one retroviral helper DNA sequence derived from a replication-incompetent retroviral genome encoding in trans all virion proteins required to package a replication incompetent retroviral vector, and for producing virion proteins capable of packaging the replication-incompetent retroviral vector at high titer, without the production of replication-competent helper virus. The retroviral DNA sequence lacks the region encoding the native enhancer and/or promoter of the viral 5′ LTR of the virus, and lacks both the psi function sequence responsible for packaging helper genome and the 3′ LTR, but encodes a foreign polyadenylation site, for example the SV40 polyadenylation site, and a foreign enhancer and/or promoter which directs efficient transcription in a cell type where virus production is desired. The retrovirus is a leukemia virus such as a Moloney Murine Leukemia Virus (MMLV), the Human Immunodeficiency Virus (HIV), or the Gibbon Ape Leukemia virus (GALV). The foreign enhancer and promoter may be the human cytomegalovirus (HCMV) immediate early (IE) enhancer and promoter, the enhancer and promoter (U3 region) of the Moloney Murine Sarcoma Virus (MMSV), the U3 region of Rous Sarcoma Virus (RSV), the U3 region of Spleen Focus Forming Virus (SFFV), or the HCMV IE enhancer joined to the native Moloney Murine Leukemia Virus (MMLV) promoter.

[0108] The retroviral packaging plasmid may consist of two retroviral helper DNA sequences encoded by plasmid-based expression vectors, for example where a first helper sequence contains a cDNA encoding the gag and pol proteins of ecotropic MMLV or GALV and a second helper sequence contains a cDNA encoding the env protein. The Env gene, which determines the host range, may be derived from the genes encoding xenotropic, amphotropic, ecotropic, polytropic (mink focus forming) or 10A1 murine leukemia virus env proteins, or the Gibbon Ape Leukemia Virus (GALV env protein, the Human Immunodeficiency Virus env (gp160) protein, the Vesicular Stomatitus Virus (VSV) G protein, the Human T cell leukemia (HTLV) type I and II env gene products, chimeric envelope gene derived from combinations of one or more of the above env genes or chimeric envelope genes encoding the cytoplasmic and transmembrane of the above env gene products and a monoclonal antibody directed against a specific surface molecule on a desired target cell. Similar vector-based systems may employ other vectors such as sleeping beauty vectors or transposon elements.

[0109] The resulting packaged expression systems may then be introduced via an appropriate route of administration, discussed in detail with respect to the method aspects disclosed herein.

### Pharmaceutical Compositions

[0110] Pharmaceutical compositions disclosed herein include one or more pharmaceutically or physiologically acceptable carriers, diluents or excipients. Such compositions may comprise buffers such as neutral buffered saline, phosphate buffered saline and the like; carbohydrates such as glucose, mannose, sucrose or dextrans, mannitol; proteins; polypeptides or amino acids such as glycine; antioxidants; chelating agents such as EDTA or glutathione; adjuvants (e.g., aluminum hydroxide); and preservatives. Compositions of the disclosure may be formulated for intraocular administration.

### Cells

[0111] In some embodiments of the compositions and/or nucleic acid molecules and/or methods of the disclosure, a cell of the disclosure is a retinal cell, such as a Müller glial (MG) cell, or a rod or cone photoreceptor cell. In some embodiments, the cell is a neuronal cell. In some embodiments, a neuronal cell of the disclosure is a neuron of the retina. In some embodiments, a neuron cell of the disclosure is a neuron of an optic nerve. In some embodiments, a neuron cell of the disclosure is a neuroglial or a glial cell. In some embodiments, a cell is a bipolar neuron, a horizontal cell, a ganglion cell, or an amacrine cell. In some embodiments, a cell of the disclosure is an astrocyte. In some embodiments, cells of the disclosure are macroglia or microglia or glia.

[0112] In some embodiments of the compositions and methods of the disclosure, a cell of the disclosure is a cultured cell.

[0113] In some embodiments of the disclosure, a cell is in vivo, in vitro, ex vivo, or in situ. In some embodiments, the cells are modified ex vivo and transplanted into and/or administered to the retina of a subject in need thereof.

[0114] In some embodiments, a cell of the disclosure is autologous or allogeneic and used for transplantation.

[0115] In some embodiments, a cell of the disclosure is a stem cell-derived or an embryonic stem cell-derived retinal cell. In some embodiments, the cell is derived from an induced pluripotent stem cell (iPS cell)-derived retinal cell. In some embodiments, the cell is derived from a retinal organoid.

### Methods

[0116] Described herein are methods for stimulating regeneration of retinal ganglion cells, and/or inducing retinal regeneration, in a subject. Also provided are methods for enhancing retinal regeneration, improving retinal neurogenesis, potentiating retinal regeneration, restoring vision, and treating retinal degenerative disease, damage, injury, or blindness.

[0117] Also provided herein are methods for inducing retinal regeneration comprising administering to a subject a composition as described herein. In some embodiments, the methods are effective to increase the number of Müller glial-derived retinal ganglion cells, to induce Müller glial (MG) cells to enter the mitotic cell cycle, and/or to generate new retinal neurons, including the generation of new ganglion cells. In some embodiments of the method, the number of retinal neurons increases by at least 25% relative to a baseline level or other reference amount representative of an untreated retina. In other embodiments, the number of retinal neurons increases by at least 40%. In some embodiments, the number of retinal neurons increases by 10%, 20%, 50%, 100%, 150%, 200%, or more.

[0118] Optionally, methods disclosed herein may utilize combined therapy compositions comprising one or more, or two or more, small molecule reprogramming potentiating agents. The agents can be administered sequentially or concurrently with the nucleic acid molecules disclosed herein. In another embodiment, one or more protein/peptide or miR-based reprogramming potentiators can be incorporated into the nucleic acid molecules used in the methods disclosed herein. In some embodiments, the method is performed in the absence of such reprogramming potentiators.

[0119] The subject is typically a mammal, such as a human or veterinary subject. In one embodiment, the subject is an adult. The subject, in some embodiments, has a retinal degenerative disease. Examples of such retinal degenerative diseases include, but are not limited to, Age-related Macular Degeneration (AMD), Retinitis Pigmentosa (RP), Diabetic Retinopathy (DR), Central Retinal Artery Occlusion (CRAO). Vitreoretinopathy, and Glaucoma.

### Administration and Dosage

[0120] The compositions and/or nucleic acid molecules disclosed herein are administered in any suitable manner, often with pharmaceutically acceptable carriers. Suitable methods of administering compositions, compounds, molecules, nucleic acids, and vectors in the context of the present invention to a subject's eye or retina are available, and, although more than one route can be used to administer a particular composition, a particular route can often provide a more immediate and more effective reaction than another route. For treatment of the retina, intraocular injection, such as, for example and without limitation, intravitreal injection and subretinal injection are the most common routes of delivery to the retina. In some embodiments, however, periocular, suprachoroidal, systemic, or topical administration is more suitable for efficacy and safety of delivery.

[0121] The dose administered to a patient, in the context of the disclosure herein, should be sufficient to result in a beneficial therapeutic response in the patient over time, or to inhibit disease progression. Thus, the composition is administered to a subject in an amount sufficient to elicit an effective response and/or to alleviate, reduce, cure or at least partially arrest symptoms and/or complications from the retinal disease or injury. An amount adequate to accomplish this is defined as a “therapeutically effective dose.”

[0122] Routes, order and/or frequency of administration of the therapeutic compositions disclosed herein, as well as dosage, will vary from individual to individual, and may be readily established using standard techniques. In general, an appropriate dosage and treatment regimen provides the active compound(s) in an amount sufficient to provide therapeutic and/or prophylactic benefit. Such a response can be monitored by establishing an improved clinical outcome in treated patients as compared to non-treated patients.

### EXAMPLES

[0123] The following examples are presented to illustrate the present invention and to assist one of ordinary skill in making and using the same. The examples are not intended in any way to otherwise limit the scope of the invention.

### Example 1: Reprogramming Müller Glia to Regenerate Ganglion-Like Cells with Developmental Transcription Factors

[0124] Many neurodegenerative diseases cause degeneration of specific types of neurons. For example, glaucoma leads to death of retinal ganglion cells, leaving other neurons intact. Neurons are not regenerated in the adult mammalian central nervous system. However, in non-mammalian vertebrates, glial cells spontaneously reprogram into neural progenitors and replace neurons after injury. We have recently developed strategies to stimulate regeneration of functional neurons in the adult mouse retina by overexpressing the proneural factor Ascl1 in Müller glia. In this Example, we test additional transcription factors (TFs) for their ability to direct regeneration to particular types of retinal neurons. We engineered mice to express different combinations of TFs in MG, including Ascl1, Pou4f2, Islet1 and Atoh1. Using IHC, scRNA-seq, scATAC-seq, and electrophysiology we find retinal ganglion-like cells can be regenerated in the damaged adult mouse retina in vivo with targeted overexpression of developmental RGC-transcription factors.

[0125] In the past few years, our group and others have found strategies to stimulate MG in adult mice to behave similar to their fish counterparts and generate neurons (4-9). We screened a number of transcription factors (TFs) that were differentially expressed between mouse MG and retinal progenitors for their ability to stimulate neurogenesis in MG in vitro (10). One factor that emerged from this screen was the proneural basic helix-loop-helix (bHLH) TF Ascl1, which was able to induce neurogenesis from MG in vivo in young mice (11) and when cotreated with a histone deacetylase [trichostatin A (TSA)] in adult mice (4). Ascl1-expressing MG adopt a molecular phenotype similar to developing retinal progenitors, and a subset of these cells undergoes mitotic division (5, 12). Some of these newly generated cells go on to differentiate into retinal neurons that connect with the endogenous circuitry (4, 5). Using Ascl1 to stimulate MG neurogenesis causes most MG-derived neurons to take on a bipolar cell fate, with a minority resembling amacrine cells (4, 12). Recently, we reported that the efficiency and range of neuronal cell types generated through MG reprogramming can be substantially improved by adding an additional bHLH TF of the atonal class (Atoh1/7). With this combination, up to 80% of the MG expressing Ascl1 and Atoh1 will become neurogenic precursors and ultimately neurons (13).

[0126] Our previous results show that combining two TFs of the same type (bHLH proneural) causes a substantial increase in the efficiency of in vivo MG reprogramming, but we were unable to control the types of neurons generated by MG in this paradigm. This is in some way similar to the process of regeneration in zebrafish, where injury triggers the generation of all neuronal types, regardless of whether the injury is widespread or targeted to specific cell types (14, 15). However, particular retinal diseases often are the result of a defect in a specific neural class. For example, in glaucoma, blindness results from the loss of retinal ganglion cells (RGCs) (16). Therefore, an impetus exists to direct endogenous regeneration to a particular affected type of neuron for cell replacement strategies.

[0127] Here, we test whether combining Ascl1 with other types of developmentally important TFs can more precisely direct MG-derived retinal progenitors to specific retinal cell fates. Specifically, we explore the effects of combining Ascl1 overexpression with two other TFs of different classes, Islet1, a LIN, Islet1, MEC3 (LIM) homeodomain TF, and Pou4f2, a class IV, Pit-Oct-Unc (POU) homeodomain TF. Both factors have been shown to be important for cell fate determination in the developing retina, with Pou4f2 necessary for RGC differentiation and Islet1 important in the development of several types of retinal neurons including RGCs (17, 18).

[0128] We find that the expression of Pou4f2 and Islet1, along with Ascl1, in adult mouse MG, directs a subset of the neurons generated by the MG toward a cell fate that resembles RGCs. The MG-derived RGC-like neurons (i) can be immunolabeled with markers of normal RGCs; (ii) have a transcriptome similar to developing RGCs by single-cell RNA sequencing (scRNA-seq); (iii) have a broader range of electrophysiological characteristics than neurons generated by Ascl1 alone, such as action potentials; and (iv) display a pattern of chromatin accessibility similar to developing RGCs. Together, our results show that neural regeneration from MG can be directed to specific cell types using combinations of developmentally relevant TFs.

### Materials and Methods

### Primary Cell Culture

[0129] Retinas from tetO-Ascl1-GFP or tetO-Pou4f2-Islet1-Ascl1-GFP mice of both sexes were harvested at Postnatal Day 12 (P12) for MG cultures. For dissociation, the retinas were incubated in a solution of papain and deoxyribonuclease (DNase) (Worthington) for 10 min at 37° C., followed by trituration. To stop the reaction, an equal volume of ovomucoid (Worthington) was added. Cells were then spun at 4° C. at 300 g for 10 min and resuspended in growth medium consisting of Neurobasal (Gibco), 10% fetal bovine serum (FBS) (Clontech), N2 (Invitrogen), 1 mM L-glutamine (Invitrogen), 1% penicillin-streptomycin (Invitrogen), and mouse epidermal growth factor (100 ng/ml) (R&D Systems). Cells were plated at a density of two retinas per 10 cm2 in a six-well dish and incubated at 37° C. The medium was changed every 2 days until confluent (˜7 days). At confluence, cells were passaged with TrypLE (Gibco); resuspended in a freezing medium consisting of 50% growth medium, 40% FBS, and 10% dimethyl sulfoxide (DMSO); and stored at least 1 day in liquid N02 for at least 24 hours. After thawing, cells were grown in FBS-reduced growth medium (1%) and treated with doxycycline to induce tetO-mediate genes.

### Animals

[0130] All animals were treated and housed with University of Washington Institutional Animal Care and Use Committee approved protocols. The (i) Glast-CreER:LNL-tTA:tetO-mAscl1-ires-GFP, (ii) Glast-CreER:LNL-tTA:tetO-P&I:tetO-mAscl1-ires-GFP, (iii) Glast-CreER:LNL-tTA:tetO-Atoh1:tetO-P&I:tetO-mAscl1-ires-GFP mice, (iv) rtTa:tetO-Ascl1-ires-GFP, and (v) rtTa:tetO-P7I:tetO-Ascl-ires-GFP are from mixed backgrounds of C57BL/6 and B6SJF1. The Glast-CreER, LNLtTA, and rtTa mice are from the Jackson Laboratory. The tetO-mAscl1-GFP mice were a gift from M. Nakafuku (University of Cincinnati), the tetO-Atoh1 mice were a gift from P. Chen (Emory University), and the tetO-P&I mice were a gift from X Mu (University of Buffalo). Males and females were both used in experiments at equal frequencies. All in vivo experiments were performed on adult mice that were over 40 days old.

### Immunohistochemistry

[0131] After CO2-mediated euthanasia, corneas were removed and eye globes were fixed for 30 min in 4% paraformaldehyde (PFA) in phosphate-buffered saline (PBS). Fixed eyes were then incubated overnight in 30% sucrose at 4° C. Retinas were then frozen in optimal cutting temperature compound (O.T.C.) and cryosectioned at 18 μm. For immunostaining, sections were washed two times for 10 min in PBS and then incubated in primary antibody in 0.5% Triton X-10 and PBS overnight. Slides were then washed in PBS and incubated in secondary antibodies for 1 hour. Last, slides were washed again in PBS and coverslipped with Fluoromount-G (SouthernBiotech). See Table 1 for antibody and concentration information.

[0132] Cultured MG were plated on glass coverslips with FBS-reduced growth medium (described above). To activate the transgenes, doxycycline was added at a concentration of 3 μg/ml every 24 hours for a period of 5 days. The coverslips were washed with PBS and then fixed with 4% PFA for 10 min at room temperature (RT), followed by 3×5 min of washes with PBS. Primary antibody incubation was done in 0.5% Triton X-10 and 10% normal horse serum (NHS) in PBS overnight at 4° C. Coverslips were washed in PBS and then click chemistry was used to label EdU (Click-iT EdU Assay, Invitrogen), followed by incubation with secondary antibodies and 4′,6-diamidino-2-phenylindole at RT for 1 hour. After staining, the coverslips were washed three more times and placed onto slides with Fluoromount-G (SouthernBiotech).

TABLE 1
List of antibodies used in the study. Columns identify the antibody, source, catalog
number, RRID identifier and concentration used for immunohistochemistry.

| | | | |
|---|---|---|---|
| REAGENT or | | | |
| RESOURCE | SOURCE | IDENTIFIER | CONCENTRATION |

Antibodies

| | | | |
|---|---|---|---|
| Goat anti-Brn3 | Santa Cruz | Cat#: SC-6026 | 1:300 |
| | | RRID: AB_673441 | |
| Rabbit anti-Calbindin | Millipore | Cat#: AB1778 | 1:1000 |
| | | RRID: AB_2068336 | |
| Rabbit anti-Calretinin | SW Ant | Cat#: 7699 | 1:500 |
| | | RRID: AB_10000321 | |
| Chicken anti-GFP | Abcam | Cat#: Ab13970 | 1:1000 |
| | | RRID: AB_300798 | |
| Mouse anti-HUC/D | Invitrogen | Cat#: A-21271 | 1:500 |
| | | RRID: AB_221448 | |
| Mouse anti-Islet1 | DSHB | Cat#: 40.2D6 | 1:50 |
| | | RRID: AB_528315 | |
| Mouse anti-Neu/N | Millipore | Cat#: MAB377 | 1:1000 |
| | | RRID: AB_2298767 | |
| Rabbit anti- | Chemicon | Cat#: AB1982 | 1:500 |
| Neurofilament | | RRID: AB_2313731 | |
| Goat anti-OTX2 | R&D Systems | Cat#: BAF1979 | 1:250 |
| | | RRID: AB_2157171 | |
| Rabbit anti-SATB1 | Abcam | Cat#: Ab109122 | 1:300 |
| | | RRID: AB_10862207 | |
| Goat anti-Sox2 | Santa Cruz | Cat#: SC-17320 | 1:1000 |
| | | RRID: AB_2286684 | |
| Rabbit anti-Tuj1 | Covance | Cat#: MRB-435p | 1:500 |
| | | RRID: AB_2313773 | |

Secondaries

| | | | |
|---|---|---|---|
| Donkey anti-chicken 488 | Jackson Immuno | Cat#: 703-545-155 | 1:1000 |
| Donkey anti-goat 568 | Life Technologies | Cat#: A11057 | 1:1000 |
| Donkey anti-goat 647 | Jackson Immuno | Cat#: 705-605-147 | 1:1000 |
| Donkey anti-mouse 568 | Life Technologies | Cat#: A10037 | 1:1000 |
| Donkey anti-mouse 647 | Jackson Immuno | Cat#: 715-605-150 | 1:1000 |
| Donkey anti-rabbit 568 | Life Technologies | Cat#: A100042 | 1:1000 |
| Donkey anti-rabbit 647 | Thermo Fisher | Cat#: A-31573 | 1:1000 |
| | Scientific | | |

### Fluorescence-Activated Cell Sorting

[0133] Following euthanasia, retinas were dissociated into single cells as described for cell culture; after pelleting at 300 g at 4° C., cells resuspended in Neurobasal solution and passed through a 35-μm filter. Using a BD FACSAria III cell sorter (BD Bioscience), FACS was performed on GFP+ cells.

### Injections

[0134] Intravitreal injections were performed with a 32-G Hamilton syringe on mice anesthetized with isoflurane. Injections of NMDA were done in a volume of 1 μl at a concentration of 100 mM in PBS. TSA (Sigma-Aldrich) was administered via intravitreal injections in DMSO at a concentration of 1 μg/μl. Intraperitoneal injections of tamoxifen (1.5 mg per 100 μl of corn oil) were administered to adult mice for four consecutive days to induce expression of the tetO-mAscl1-ires-GFP, the tetO-P&I, and the tetO-Atoh1 gene.

### Microscopy/Cell Counts

[0135] Images were taken on a Zeiss LSM880 confocal microscope. For quantification of cell counts, a minimum of four images per retina with a 20× objective were taken at the same magnification.

### Electrophysiology

[0136] Recordings were performed identical to our previous reports (4, 5). Mice were dark-adapted before recordings. After euthanasia, retinas were sliced into 200-μm slices for recording. Tissue recordings were performed in Ames medium at 32° C. and oxygenated with 95% O₂/5% CO2. GFP+ cells were targeted for recording using video differential interference contrast with infrared light and confocal microscopy. Light responses were measured under infrared conditions, and the tissue was exposed to full-field illumination via blue and green light-emitting diodes. Recordings were performed using pulled glass pipettes and filled with solution containing the following: 123 mM K-aspartate, 10 mM Hepes, 1 mM MgCl2, 10 mM KCl, 1 mM CaCl2, 2 mM EGTA, 0.5 mM tris-guanosine triphosphate, 4 mM MG-adenosine triphosphate, and 0.1 mM Alexa Fluor 695 hydrazide.

### Single-Cell RNA Library Construction

[0137] For in vivo datasets, following FACS purification of GFP+MG, cells were centrifuged at 300 g at 4° C. and resuspended at a concentration of 1000 cells/μl. Library construction was done using 10× Genomics 3′ single-cell RNA V3 or V3.1 sequencing kits as described by the manufacturer. Cells were encapsulated in gel beads and in given unique barcodes using the 10× Chromium controller and 10× Genomics chip type G. Libraries were multiplexed using single and dual index kits (10× Genomics).

[0138] For in vitro experiments, MG cultures from three to five mice were used. Following 5 days of doxycycline treatment, cells were dissociated using a mix of Accutase (Sigma-Aldrich, Saint-Louis, MO) and DNAse (Worthington, Lakewood, NJ) for 2 min and then spun down at 400 relative centrifugal force for 7 min at 4° C. The pellet was resuspended in culture medium to reach a targeted concentration of 1000 cells/μl. Cells were passed through a strainer and loaded into the 10× Genomics Chromium Single Cell chip G following the protocol of Chromium Single Cell 3′ Reagents Kits v3.1 (10× Genomics, Pleasanton, CA).

### Single-Cell RNA Sequencing, Mapping, and Data Analysis

[0139] Libraries were sequenced using an Illumina NextSeq 500, in most cases using multiplexed libraries using high-output 150 kits. Data were demultiplexed and aligned to the mm10 genome using CellRanger version 3.0. Filtered output files were further analyzed in R using Seurat version ≥3.0, ggplot2, data.table, dplyr, tidyr, and other commonly used R packages. Low-quality cells (identified as having low read depth or high mitochondrial content; >10%) were removed from datasets. Microglia, as well as any astrocytes or endothelial cells present (for in vitro experiments), were identified and removed from the data before downstream analysis. In addition, before analysis, gene expression data were normalized and scaled, and cells were clustered using principal components analysis and UMAP, using the tools available in the Seurat R package version ≥3.0. Comparisons between datasets were done by canonical correlation analysis as described by the Satija laboratory vignette (46) (https://satijalab.org/seurat/archive/v3.0/integration.html).

Integration with Development Data

[0140] For comparison to developing retina, data were first downloaded from Gene Expression Omnibus (GEO) (21). The label transfer was carried out in Seurat using a reference dataset composed of 432 randomly sampled cells of each major cell class in the developing retina dataset (Rod, Cone, Bipolar, Amacrine, Horizontal, Retinal Ganglion, and Müller glia), for a total of 3024 cells, as identified by canonical markers. Reads were downsampled to a common average depth before analysis. In addition, the IPA neurons were integrated directly with a subset composed only of E14 cells from the development dataset.

### Single-Cell ATAC Sequencing

[0141] The Cellranger ATAC pipeline (2.0.0) was used to preprocess the data resulting from sequencing (47). First, “cellranger-atac mkfastq” was used to convert BCL files to fastqs and demultiplex reads. Next, “cellranger-atac count” was run to map Tn5 sites to mm10 (mouse genome), remove duplicate reads, and remove background cells. This returned peak by cell matrices and barcoded fragment files that were loaded into Signac (48), an R (4.0.4) (R core team, 2021) package. Macs2 was then run on the Signac object and barcoded fragment files to call peaks using Signac's “CallPeaks” function (49). Fragments were mapped to the peaks called by Macs2 and assigned to cells using Signac's “FeatureMatrix” function. Further quality control (QC) metrics were measured in Signac using the “NucleosomeSignal” and “TSSEnrichment” functions. Cells who were outliers in the QC metric categories were removed as per Signac's standard processing guidelines. Latent semantic indexing (LSI) was performed in Signac using the “RunTFIDF” and “RunSVD” functions. Signac's “DepthCor” was used to identify LSI dimensions that were highly correlated with read depth; these LSI dimensions were excluded from downstream analysis. Signac/Seurat's “RunUMAP” function was run to compute the UMAP embedding. To identify clusters, Signac/Seurat's “FindClusters” was then run at varying resolutions. Clusters were assigned to known retinal cell types by inspecting Tn5 insertions within 100 kb of known marker genes using Signac's “CoveragePlot” and further supported using chromVAR scores for known lineage-specific TFs. Clusters of the same type were grouped for visualization purposes. Vertebrate motifs were acquired from the Jaspar 2020 database. Signac's “AddMotifs” function was used to map these motifs to peaks within the Signac object. Signac's “RunChromvar” function was used to calculate motif accessibility z score across all cells.

### Dataset Integration

[0142] Before integrating Signac objects, we first ran all previous computational steps on each sample independently. Next, we created a shared peak set for all objects that were to be integrated using BEDOPS (-m) (50). Signac's FeatureMatrix function was run on each sample with the merged peak set to put all samples in the same feature space. Samples were next downsampled to the same average read depth using DropletUtils “downsampleMatrix” function. Samples were merged using Signac/Seurat's “merge” function, and standard Signac normalization, dimensional reduction, clustering, and visualization were performed on the merged object as described above. The object was then split by samples, and the samples were integrated together. Anchors between samples were calculated using “FindIntegrationAnchors,” and an integrated embedding space was then calculated using Signac's “IntegrateEmbeddings” function. UMAP and clustering for the integrated object were performed as previously described.

### Pseudotime Analysis

[0143] To calculate pseudotime and identify trajectory branches, samples were loaded into Monocle 3 (51) using SeuratWrapper's “as.cell_data_set” function. Clustering was performed and partitions were defined using Monocle 3's “cluster_cells.” Monocle 3's “learn_graph” was then run to define the principal trajectory graph. The pseudotime root was placed in the progenitor-like or MG-like cluster using Monocle 3's “order_cells.” Branches were selected using Monocle 3's “choose_graph_segments.” Pseudotime and branch data were transferred back to the Seurat object for later analysis.

### Scatterplots

[0144] To create the scatterplots, Signac/Seurat's “FindMarkers” function was run between cell groups of interest, using the top 25% most accessible peaks in those cell groups. A scatterplot was then made showing the percent of cells in each group that had accessibility of each peak. Peaks with an average log base twofold change greater than 0.05 were selected for each group. For GO analysis, these peak sets were then loaded into GREAT (Genome Regions Enrichment of Annotations Tool) (52) or analyzed with gprofiler2 package in R for scRNA-seq data.

### Cascade Heatmaps

[0145] To construct the Cascade heatmaps, motif names were translated to mouse gene names using R and biomart's “getLDS” function. Pseudotime lineage branches for the RGCs were subset from the RNA and ATAC data from E14 samples. Variable motifs were identified by running chromVAR's “addGCBias,” “getBackgroundPeaks,” “computeDeviations,” and “computeVariability” functions. Peaks with a verbality score greater than 1.2 were kept for further analysis. This motif list was then subset again; only motifs corresponding to TFs expressed by more than 10% of cells in the RGC branch were kept. Last, conjoined motifs were dropped. Motif enrichment scores for selected motifs were ordered over pseudotime in the E14 RGC branch in the scATAC-seq data by fitting their ChomVAR scores to a third-order polynomial function and ordering motifs by the maximum value of this function within our pseudotime range. To create the heatmaps, chromVAR motif accessibility z scores were plotted in the previously derived order over pseudotime within the RGC lineage. RNA heatmaps were created by plotting the genes whose binding sites were in the final motif list in the same order across pseudotime in the RNA object within RGC lineage. The cascade heatmap for the reprogrammed cells was created by plotting motifs and factors identified in the developmental data.

### Results

[0146] Pou4f2 and Islet1 increase the diversity of neurons from Ascl1-reprogrammed MG

[0147] We previously developed a mouse where Ascl1 is induced specifically in MG (Glast-CreER:LNL-tTA:teto-mAscl1-GFP:ccGFP) by application of tamoxifen. After Ascd1 induction, retinal injury [N-methyl-D-aspartate (NMDA)] followed by injection of a histone deacetylase inhibitor (TSA) induces MG to express genes associated with developing retinal progenitors and to generate new neurons in the adult mouse retina in vivo. Most of these newly generated neurons adopt a bipolar cell fate (4, 5, 12). To examine whether expression of additional TFs (Pou4f2 or Islet1) can direct the MG-derived progenitors to other neuronal fates, we crossed the Glast-CreER:LNL-tTA:teto-mAscl1-GFP mice with a tetO-Pou4f2-tetO-Islet1 transgenic mouse line (tetO-IPA; FIG. 1A). This construct encodes Pou4f2 and Islet1 separated by two different loxP variants (19). When exposed to Cre recombinase, this cassette allows for expression of either Pou4f2, Islet1, or sometimes both.

[0148] The tetO-IPA mouse line allows us to test whether MG reprogramming is enhanced by treatment with Pou4f2+Ascl1, Islet1+Ascl1, or Islet1+Pou4f2+Ascl1 (hereafter IPA). After intraperitoneal application of tamoxifen to induce the TFs in MG, we induced a retinal injury by intravitreal injection of NMDA, followed by TSA (FIG. 1B). The mice were then euthanized 3 weeks later for immunofluorescence analysis to assess the fate of recombined MG (FIG. 1, C to E). FIG. 1 (C and D) shows that this protocol induces the transgenes in MG and neurons derived from them [green fluorescent protein positive (GFP+)]. We found GFP+MG-derived cells expressing either Brn3 (Pou4f2) (17%), Islet1 (33%), or both TFs (7%) (FIG. 1, C and D).

[0149] Additional immunohistochemistry (IHC) analysis demonstrated that the IPA combination effectively promoted neurogenesis from MG. Most glial-derived cells acquire a neuronal morphology 3 weeks after injury (FIG. 1E). Quantifications of MG-derived cells in retinal sections from IPA-treated mice confirmed that the MG-derived GFP+ neuronal-like cells expressed the ganglion/amacrine marker HuC/D (FIG. 1, F and G) or the bipolar marker Otx2 (FIG. 1, G and H). IPA expression substantially enhanced MG neurogenesis of HuC/D neurons compared to Ascl1 alone (FIG. 1G). Consistent with our previous reports, a subset of the MG-derived neurons was derived from EdU+, proliferating MG (FIG. 8A-8C). Together, these data suggest that the addition of TFs Pou4f2 and/or Islet1 enhances the neurogenic capacity and expands the resulting cell fates of Ascl1-MG in vivo.

[0150] We had previously found that the combination of Ascl1:Atoh1 could stimulate neurogenesis from MG in the absence of retinal damage (13). In contrast, IPA induction in the undamaged retina was not sufficient to stimulate neurogenesis (FIG. 9, A, B, and E). We also tested whether MG could undergo neurogenic reprogramming if we activated the IPA factors in MG after NMDA injury and TSA rather than before NMDA and TSA as shown in FIG. 1. We found that induction of IPA after injury stimulated a small amount of neurogenesis, but substantially less than our original paradigm (FIG. 9, C to E).

[0151] Because a substantial portion of the newly generated neurons in the damaged retina expressed the ganglion/amacrine marker HuC/D, we performed whole-mount imaging of IPA-derived neurons to better assess their neuronal morphology. This revealed cells with large branching dendritic arbors reminiscent of RGCs or wide-field amacrine cells; cells with this morphology were not previously seen with Ascl1 alone (FIG. 2, A to F).

IPA Induces Neurons with an RGC-Like Transcriptome

[0152] We next used scRNA-seq to analyze how Islet1 and Pou4f2 alter the phenotype of Ascl1-mediated MG reprogramming. Three weeks after initiating the IPA regeneration protocol, MG cells and their progeny were fluorescence-activated cell sorting (FACS)-purified and processed for scRNA-seq as previously described (5, 12). To directly compare the changes in cell fates induced by IPA with those caused by expression of Ascl1 alone, we used Seurat to integrate data from IPA treatment with previously obtained Ascl1-only reprogramming libraries (4) and clustered the cells (FIG. 3A). The combined data from the IPA experiment and the prior Ascl1 dataset were projected onto a single uniform manifold approximation and projection (UMAP) plot and clusters of cell types were identified by known marker genes (FIG. 3B).

[0153] The combined UMAP plot of Ascl1-only versus IPA treatment contains clusters of cell types (e.g., MG, progenitors, and bipolar cells) that we have previously observed during Ascl1-mediated reprogramming (FIG. 3A). This analysis revealed two additional phenotypes unique to the IPA condition. First, the neurogenic efficiency of MG is increased over twofold with IPA versus Ascl1 only (FIG. 3C), which is consistent with our IHC data and suggests that the combination of these three TFs potently stimulates neurogenesis from adult MG. Second, a novel cluster appeared after IPA treatment that did not exist in the Ascl1-only condition (FIG. 3C). While cells expressing Islet1 but not Pou4f2 were found mostly in the bipolar cluster, cells expressing Pou4f2, with or without detectable Islet1, were largely found in the novel RGC-like cluster (FIG. 10A to 10C).

[0154] The new cluster of cells induced by IPA shows a high expression of genes characteristic of RGCs, such as Elavl4 and Sox11 (FIG. 3B) (20). In addition, we found that these IPA neurons expressed many genes found in the gene ontology (GO) terms “axon guidance,” “axon outgrowth,” and “axogenesis” (FIG. 10D). Because Islet1 and Pou4f2 are upstream of an RGC fate-inducing regulatory network, we assayed whether this combination of factors was able to induce multiple RGC genes in this cluster of MG-derived neurons. We used the label transfer feature of Seurat to broadly compare the transcriptome of the IPA neurons to a reference dataset of all major retinal neuron classes (21, 22). The novel cluster was classified as an RGC cluster (average prediction score=0.74), suggesting an overall transcriptomic similarity to native RGCs (FIG. 10E). Compared to Ascl1-induced neurons, a substantial number of RGC-associated genes were expressed in IPA-induced neurons (FIG. 3D). These include genes such as Sox4 and Sox11, which are redundantly required for RGC fate acquisition (23, 24), and the axon growth-associated gene Gap43, which is highly expressed in developing RGCs (25). We found that both Satb1 and Cntn5 were expressed in subsets of IPA-induced neurons. Satb1 is highly expressed in the ON-OFF direction-selective subtype of RGCs where it controls Cntn5 expression (26). Using IHC, we were able to confirm that IPA-induced neurons expressed Satb1 protein (FIG. 3E). In addition, the RGC and amacrine marker Calretinin (Calb2) was also detected at the RNA and protein levels (FIG. 3, C and F).

[0155] Despite this large suite of RGC genes expressed by the MG-derived RGC-like neurons, these cells fail to express some canonical RGC markers such as Pou4f1, Sncg, Rbpms, and Nefm (FIG. 3D). This suggests that the newborn neurons do not fully differentiate into mature RGCs. Consistent with this observation, when we integrated the scRNA-seq data of IPA-induced neurons with a dataset from E14 (embryonic day 14) embryonic mouse retina (21), we find that the MG-derived RGC-like neurons most closely resemble immature RGCs (FIG. 3G). We compared the IPA-induced neurons from a 3-week end point with a longer survival time point (6 weeks) and found that the regenerated RGC-like neurons were a stable population and did not show evidence of increased cell death or stress over this period (FIG. 11A-11D).

[0156] Simultaneous expression of Islet1-Pou4f2 with Ascl1 more uniformly induces an RGC state from MG in vitro

[0157] Because the tetO-Pou4f2 and Islet1 transgenic construct contains mutually exclusive loxP sites, most of the Cre-expressing MG in vivo expressed Ascl1 and either Pou4f2 or Islet1. While a small number of cells colabeled for both Pou4f2 and Islet1 in vivo (FIG. 1, C and D), to better assess the effect of overexpressing all three transgenes uniformly, we bred mice containing the tetO-Pou4f2-Islet1 and tetO-Ascl1-GFP cassettes to a germline Rosa26-rtTA line and then performed in vitro MG-reprogramming experiments (FIG. 4, A and B). MG were cultured from postnatal day 1111 mice for 7 days before passaging as previously described (10). The cultures obtained in this way are largely composed of MG, although some surviving neurons are observed (10). 5-Ethynyl-2′-deoxyuridine (EdU) was added to the medium to determine which cells are derived from proliferating MG and which cells were likely surviving neurons from the initial dissociation. After passage, doxycycline was added to the medium to induce transgene expression, and then cells were assayed with immunofluorescence and scRNA-seq (FIG. 4B).

[0158] Analysis of the cultures after 5 days of treatment confirmed that the cells express the transgenes. Immunolabeling for the transgenes showed that cells coexpress Pou4f2, Islet1, and Ascl1 (FIG. 12A). The cells largely adopted a neuronal morphology, and immunolabeling demonstrated EdU+ cells that were colabeled with neuronal markers Tuj1 (FIG. 4C), Neurofilament (FIG. 4D), and Calbindin (FIG. 4E).

[0159] To determine how the overexpression of IPA differed from Ascl1 alone, we repeated the reprogramming experiment as described above, alongside sister MG cultures from tetO-Ascl1;Rosa26-rtTA mice, either with or without doxycycline treatment to activate transgene expression. We carried out scRNA-seq as described above for each sample. The untreated MG were largely homogeneous, with one glial cluster and a small cluster containing only a few surviving neurons (FIG. 12, B and C). To compare the cluster composition between the treatment conditions, as well as to the in vivo IPA dataset, we integrated all three together (FIG. 4, F to I, and FIG. 12D). We identified cells in both the Ascl1-only in vitro and IPA-reprogrammed MG in vitro that mapped to the neuron clusters from the IPA in vivo dataset. However, each treatment stimulated one main neuron cluster from MG; in the Ascl1 culture, the neurons most closely resembled bipolar cells (FIG. 4, F and 1), while in the IPA cultures, the neurons acquired an RGC-like fate (FIG. 4, G and 1), with a minority differentiating into bipolar cells. This differed from our observations in vivo, in which the bipolar cluster was similar in proportion to that of the Ascl1-only sample (FIGS. 1D and 4, F and H).

[0160] Next, we compared the gene expression profiles of the induced neurons in the IPA and Ascl1-only in vitro datasets. We observed that bipolar genes, such as Cabp5, were largely restricted to the Ascl1-only neuron cluster. RGC genes, such as Grin2a and Calb1, were found only in the IPA neurons (FIG. 4J). To identify unique marker genes expressed in the IPA neurons, we made a subset of all neuron populations in the IPA and Ascl1-only integrated dataset (FIG. 4K) and performed differential gene expression (DGE) analysis (FIG. 4L). We identified a number of RGC genes enriched in the IPA neurons, while bipolar genes were enriched in the Ascl1 neurons. In addition, we found some canonical markers of the RGC lineage that were not induced in vivo, such as Sncg, Nefm, and Pou4f1 that were induced in vitro (FIG. 4M). We also failed to detect cells expressing the intrinsic photosensitive RGC marker Opn4 (FIG. 12E). These results collectively suggest that concurrent overexpression of all three IPA factors biases MG-derived neurons to an RGC-like fate and induces more uniform RGC gene expression.

IPA Induces Neurons with Diverse Electrical Properties

[0161] We found previously that Ascl1 can stimulate MG-derived neurons that have physiological characteristics of endogenous retinal neurons, particularly bipolar cells (4, 13). Because IPA treatment leads to a different molecular and morphological neuronal phenotype compared to Ascl1 alone, we characterized the light responses and electrical properties of these cells. We performed patch-clamp electrophysiology on GFP+ cells in retinal slices and whole mounts after our IPA in vivo regeneration paradigm. We measured responses to current and voltage steps and responses to light stimuli. We plotted the membrane resistance and resting potential of IPA-induced neurons compared to GFP-MG, endogenous neurons, and neurons from our previous regeneration strategies using Ascl1 or Ascl1:Atoh1 (FIG. 5A) (4, 5, 13). Glial cells have low membrane resistance, hyperpolarized resting potentials, and little in the way of voltage-activated conductance. Neurons have higher resistance, have less-negative resting potential, and express voltage-activated conductance.

[0162] Most of the IPA-induced neurons displayed resting potential and membrane resistance profiles similar to endogenous neurons; however, some of these cells still had glial-like hyperpolarized membrane potentials (FIG. 5A). This is consistent with our IHC and scRNA-seq analysis where a portion of glia does not reprogram after IPA treatment (see FIGS. 1 and 3). FIG. 5B shows examples of responses to families of current or voltage steps recorded from IPA-treated GFP+ cells. These cells exhibit a range of characteristics. Some have a neuronal phenotype and appear to express voltage-activated K+ conductance that limit the extent of depolarization to current steps, while others retain features of glia (FIG. 5B). Six of 16 recorded cells responded to brief light flashes, indicating that they established synaptic connections with other components of the retinal circuitry (FIG. 5C). Some cells responded to current steps by generating action potentials and others generated spiking activity likely representing Ca2+ spikes (FIG. 5D). This diversity of the physiological properties is consistent with the phenotypes observed in FIGS. 1 and 3. Notably, we did not observe action potentials, a distinct feature of RGCs, in our previous strategies to stimulate MG-derived neurons (4, 5, 13). Thus, IPA increases the diversity of the electrical properties of the MG-derived neurons, including generating some cells that can produce Na+ and/or Ca2+ action potentials.

### IPA Expression Remodels MG Chromatin to an Imperfect RGC-Like Fate

[0163] We next carried out single-cell assay for transposase-accessible chromatin sequencing (scATAC-seq) on Ascl1 versus IPA-reprogrammed MG to gain a better understanding of the mechanistic differences between these two reprogramming strategies. Mice were treated with the same in vivo retinal regeneration paradigm described in FIG. 3 but were processed for scATAC-seq instead of scRNA-seq. Nuclei (1692) from Ascl1 only and 2451 nuclei from IPA treatment passed our quality control metrics (see Materials and Methods). Single cells from these two treatments were then integrated and plotted as a UMAP to identify cell types (FIG. 6, A to C). Cell type clusters were identified by the pattern of accessible chromatin near genes identified with specific retinal cell types. Coverage plots show representative peaks for the groups we identified: MG (Rlbp1+), neurogenic transition (Islet1+), MG-derived bipolar cells (Crx+), induced RGC-like cells (Pou4f2+), and photoreceptors (Arr3+) (FIG. 6D). When the UMAP is split between the two treatment groups, it is clear that, while a large cluster of cells retain a MG phenotype, both the Ascl1 and the IPA conditions lead to MG-derived bipolar neurons (FIG. 6, B and C). However, the IPA treatment induces a unique cluster of cells that have accessible chromatin that most closely resemble RGCs (FIG. 6C). Consistent with accessibility patterns, the motif for Otx2 is enriched in the bipolar cluster, while the Pou4f2 motif is highly represented in the accessible chromatin of the IPA-unique cluster (FIG. 6F). This is consistent with our scRNA-seq findings and demonstrates that these MG-derived neurons have patterns of cis-regulatory regions consistent with their transcriptomic identity.

[0164] To determine how closely the chromatin of MG-derived RGCs resembles that of normal, developing RGCs, we generated a scATAC library from the E14 developing mouse retina to compare with the MG-derived RGCs (FIG. 13A-13F). The scatterplot in FIG. 6G shows that there is significant correlation between the accessible peaks in E14 RGCs and the MG-derived neurons; however, there are clearly many regions that are differentially accessible between cell types (FIG. 6G). When we assayed for GO enrichment to understand the types of genes that are more highly represented in nearby accessible chromatin in E14 RGCs than in MG-derived RGCs, many of the top terms were related to axon growth (FIG. 6H and table 2). This is consistent with the fact that many MG-derived RGCs do not extend long axons.

[0165] The current model of retinal development suggests that a cascade of TFs is sequentially activated when cells transition through multipotent progenitors, to neurogenic precursors, to their ultimate neuronal cell fate (27). Therefore, we sought to examine whether neurogenesis induced in MG recapitulates developmental cascades at the chromatin level. We used pseudotime to order cells in a projected lineage from the progenitor cells to RGCs in the E14 retina and compared this with a similar analysis of MG-derived RGCs and then analyzed the motif enrichment in accessible chromatin over pseudotime in a “cascade plot” (FIG. 6, I and J) (28). This analysis reveals key differences in the process of RGC development versus RGC production from MG. Normal development of RGCs shows down-regulation of progenitor TF motifs (Rax and Sox2) in accessible regions followed by a transient increase in regions with bHLH motifs (Atoh7), and then finally induction of regions with mature RGC TF motifs (Pou4f1/2/3, Ebf1, and Onecut). This has recently been described in both mouse and human (28, 29). By contrast, the sequential changes in motif representation in accessible chromatin in MG reprogrammed to generate neurons with IPA show clear differences from normal development. Although there is a reduction in progenitor gene motifs as cells acquire an RGC-like identity, the progenitor TFs are apparently never fully down-regulated, because their motifs persist in the accessible regions of MG-derived RGCs (FIG. 6J). In addition, although MG-derived RGCs show an increase in accessible bHLH motifs and a robust increase in Pou4f1/2/3 motif representation in accessible chromatin, the TFs that are presumably downstream of Pou4f1/3, such as Onecut and Ebf, are not sequentially activated (FIG. 6J). This epigenomic analysis suggests that RGC-like generation is imperfect from IPA-treated MG, in part because of the maintenance of accessibility at glial and progenitor regulatory regions. Consistent with this notion, the progenitor/MG marker Sox2 is still detectable by immunofluorescence 3 weeks after IPA reprogramming in GFP+ cells with neuronal morphology (FIG. 6K).

Atoh1 can Improve the Ability of IPA to Induce RGC-Like Cells from MG

[0166] The scRNA and scATAC-seq analysis revealed that, although IPA-induced neurons resembled RGCs, these cells lack some features of mature RGCs. One hypothesis for why this is the case is the persistence of glial and progenitor genes and chromatin accessibility (i.e., Sox, Rax, Vsx2, etc.) in the MG-derived neurons. Recently, we have reported that the Atoh class of TFs, when combined with Ascl1, can potently stimulate neurogenesis (13); the combination of Ascl1:Atoh1 results in nearly 80% of transgene-expressing MG acquiring a neural identity. Therefore, we tested whether combining Atoh1 with IPA reprogramming could improve the regeneration of RGCs from MG in vivo.

[0167] We crossed mice containing a tetracycline-inducible Atoh1 to the IPA strain and carried out the regeneration paradigm as described in FIG. 1; we then performed scRNA-seq and IHC analysis of MG progeny as described above (FIG. 7, A and B). Consistent with our previous findings using Atoh1, the expression of IPA and Atoh1 in MG caused most of the MG progeny to acquire a neuronal identity (13). IHC revealed that most GFP+MG-derived neurons expressed the ganglion/amacrine marker HuC/D and lacked expression of the bipolar marker Otx2 (FIG. 7C). Adding Atoh1 to the combination of IPA factors also bypasses the requirement for retinal injury to induce MG neurogenesis (FIG. 14A-14D). We next performed scRNA-seq on regenerated cells treated from the IPA:Atoh1 condition and integrated them with cells from the IPA-only treatment group to determine whether the addition of Atoh1 may improve RGC generation after retinal damage (FIG. 7D). This analysis revealed that MG-derived neurons from the IPA:Atoh1 mice were most similar to the MG-derived RGCs from the IPA condition, while a smaller proportion of bipolar, cone, and amacrine cells were also present (FIG. 7D and FIGS. 14E and 14F).

[0168] To assess whether Atoh1 overexpression reduces the progenitor signature of MG-derived neurons after IPA expression, we formed a subset of the RGC-like cells from each dataset for comparison. DGE analysis showed that, in the IPA:Atoh condition, the RGC-like cells showed a greater decrease in expression of progenitor and glial genes than similar cells from the IPA only condition (FIG. 7E). This was further confirmed with GO analysis, where IPA:Atoh1 reduced genes associated with neural progenitors compared to the IPA-only condition (FIG. 7F), consistent with the hypothesis that Atoh1 promotes maturation of the RGC-like cells.

[0169] We have previously shown Ascl1:Atoh1 generates immature RGC-like cells from MG (13). We hypothesized that the addition of IPA factors to Atoh1 might induce markers of more mature RGCs. We compared IPA:Atoh1 with previously generated Ascl1:Atoh1 datasets and found a similar composition of cell types (FIG. 7G and FIG. 14E to 14H). However, we found that the addition of IPA to Atoh1 increased RGC-like cells by 15% and resulted in a corresponding decrease in bipolar and progenitor-like cells (FIGS. 14G and 14H). DGE analysis revealed that the addition of IPA to Ascl1:Atoh1 leads to an enrichment of RGC genes such as Map2 and Thy1 (FIG. 7H). Furthermore, we found that the top GO terms enriched in the IPA:Atoh1 were related to neuron projection development and axonogenesis (FIG. 7I), with many genes specifically related to axon guidance (e.g., Epha8 and Sema3e) and synaptogenesis (e.g., Syt1 and Snap25).

TABLE 2
Genes associated with peaks enriched in
E14 RGCs vs. MG-derived RGC-like cells

| negative | | | |
|---|---|---|---|
| regulation of | negative | positive | regulation of |
| glial cell | regulation of | regulation of | oligodendrocyte |
| differentiation | gliogenesis | axon extension | differentiation |
| Ctnnb1 | Abcc8 | Adnp | Ctnnb1 |
| Dab1 | Adcyap1 | Cdh4 | Cxcr4 |
| Dlx1 | Ascl2 | Disc1 | Dicer1 |
| Dlx2 | Ctnnb1 | Dscam | Dlx1 |
| Drd3 | Dab1 | Fn1 | Dlx2 |
| Dusp10 | Dicer1 | Islr2 | Drd3 |
| Hes1 | Dlx1 | L1cam | Dusp10 |
| Hes5 | Dlx2 | Limk1 | Dusp15 |
| Hmga2 | Drd3 | Map1b | Hes1 |
| Id2 | Dusp10 | Mapt | Hes5 |
| Id4 | Hes1 | Ndel1 | Id2 |
| Kdm4a | Hes5 | Nrg1 | Id4 |
| Lin28a | Hmga2 | Nrp1 | Lingo1 |
| Lingo1 | Id2 | Ntn1 | Olig2 |
| Mycn | Id4 | Ntrk3 | Rheb |
| Nkx6-1 | Idh2 | Pafah1b1 | Shh |
| Nkx6-2 | Kdm4a | Pou4f2 | Tcf712 |
| Nog | Lin28a | Rab11a | Tenm4 |
| Ntrk3 | Lingo1 | Rufy3 | Tnfrsf21 |
| | Mycn | Sema5a | Zfp365 |
| | Nkx6-1 | Sema7a | Zfp488 |
| | Nog | Srf | |
| | Ntrk3 | Vegfa | |
| | Pitx3 | | |
| | Ptn | | |
| | Ski | | |
| | Sox10 | | |
| | Sox11 | | |

regulation of axon extension

| | | | |
|---|---|---|---|
| Abl1 | Islr2 | Olfm1 | Sema3a |
| Adnp | L1cam | Pafah1b1 | Sema3f |
| Barhl2 | Limk1 | Plxna1 | Sema3g |
| Cdh4 | Map1b | Plxna2 | Sema4f |
| Cdk5 | Mapt | Plxna4 | Sema5a |
| Cdk5r1 | Mgll | Pou4f2 | Sema7a |
| Clasp2 | Ndel1 | Ptprs | Srf |
| Cttn | Nkx6-1 | Rab11a | Tnr |
| Disc1 | Nrg1 | Rtn4 | Vegfa |
| Draxin | Nrp1 | Rtn4r | Wdr36 |
| Dscam | Ntn1 | Rufy3 | Wnt3 |
| Fn1 | Ntrk3 | Ryk | Wnt5a |

### DISCUSSION

[0170] Nonmammalian adult vertebrates can regenerate neurons in many regions of their central nervous system (CNS). For example, after tail amputation in larval frogs and some adult urodeles, the radial glial cells of the spinal cord acquire a pattern of gene expression similar to neuronal precursors and go on to proliferate and regenerate an apparently normal spinal cord (30). Similarly, in the retina and brain of zebrafish, glia respond to injury by activating a progenitor-like gene expression program of TFs (31). These glia-derived progenitor cells undergo multiple rounds of mitotic cell divisions, and the progeny differentiate into the range of neuron types that can restore function in the brain and retina (32).

[0171] Reexpressing developmentally active TFs in adult mammalian glia can trigger a regenerative process in these cells that, in many ways, resembles what is found in fish and amphibians. For example, after retinal injury, the transgenic overexpression of the proneural TF Ascl1, combined with histone deacetylase inhibition, can stimulate MG to acquire a progenitor-like state with the capacity of generating bipolar neurons (4). The MG-derived neurons differentiate to the point that they make synapses with the surrounding neuronal circuitry and respond to light. In addition to lineage tracing the neurons to validate their glial derivation, we have used EdU labeling to show their adult origin and have profiled the cells using scRNA-seq, and scATAC-seq, to observe intermediate states between glial progenitor and regenerated neurons (5, 12, 13). Together, this validates that TFs can reprogram glia in the adult CNS to generate neurons.

[0172] Although Ascl1 induces MG to adopt many features of retinal progenitors, including proliferative neurogenesis and a transcriptional and epigenetic landscape similar to developmental progenitors, not all developmentally appropriate Ascl1 targets are induced in MG-derived progenitor cells, and the neuronal output from Ascl1 MG is restricted to primarily bipolar neurons (5). Thus, we reasoned that additional TFs might be required to properly steer MG-derived progenitors to specific types of neurons. This is particularly important for endogenous regeneration strategies because most blinding diseases are the result of deficits in a particular neuronal subtype. For example, glaucoma is primarily caused by the death of RGCs.

[0173] RGCs are generated during development by a cascade of TFs, characterized by the initial expression of Atoh7 and the downstream expression of additional TFs, such as Pou4f1/2 and Islet1 (33). Atoh7 is necessary for proper RGC fate by inducing these downstream stabilizing TFs (34-36). Two of these downstream TFs, Pou4f2 and Islet1, are required for proper RGC fate specification (18, 37, 38), and ectopic expression of Pou4f2 and Islet1 in the Atoh7 null retina is sufficient to rescue the RGC fate (19). By taking advantage of the wealth of knowledge of normal transcriptional regulation of the RGC fate, we were able to test whether members of this TF cascade can reinitiate the genesis of these cells from the Ascl1-induced MG-derived progenitors.

[0174] We report here that the RGC fate-inducing factors, Islet1 and Pou4f2, along with Ascl1, can induce MG neurogenesis toward an RGC-like fate. Using IHC, we show that the MG-derived neurons, from IPA-expressing MG, express protein markers and morphological features of RGCs. At the physiological level, these IPA-induced, MG-derived neurons display neuronal resting membrane potentials and a subset generated voltage-gated action potentials, consistent with an RGC-like fate. Last, our molecular analysis using scRNA-seq and scATAC-seq show that, at the transcriptomic and epigenetic levels, IPA-induced MG-derived neurons most closely resemble immature RGC cells.

[0175] Although the expression of the IPA transgenes in MG collectively reprograms a subset of the cells to an RGC-like fate, this combination does not activate the full complement of TFs required for mature RGCs. We find both in the scRNA-seq and in the scATAC-seq datasets that some mature RGC genes fail to be induced; instead, the MG-derived neurons retain expression of some progenitor/glial genes and a resulting chromatin landscape intermediate between progenitors and RGCs. The progenitor state in MG can be repressed by the expression of Atoh1 in addition to IPA, consistent with the role for atonal TFs in promoting neuronal differentiation, and this allows further differentiation of the MG-derived RGCs. Together, our results show that the ectopic expression of developmental TFs that are integral to a cell type-specific trajectory can reprogram MG toward that same trajectory. This suggests an overall approach where the complementary and sequential actions of TFs in development of specific neuronal types can be used to regenerate more mature neurons. It remains to be seen whether expression of TFs in their normal developmental sequence will provide a more effective strategy for reprogramming.

[0176] It is interesting that the RGC-like neurons derived from MG are most frequently found in the inner nuclear layer (INL), instead of the ganglion cell layer (GCL). Although a small percentage of RGCs is normally found in the INL in mice, most migrate to the GCL. It is possible that the inner plexiform layer provides a barrier to migration of the RGC-like cells, or alternatively, they may lack the cues for appropriate migration. Although the scRNA-seq data show MG-derived RGC-like cells express many RGC genes, they may lack some critical migration program. Nevertheless, some of these cells connect with the existing neural circuitry and respond to light, and it may be that appropriate connectivity can be established without proper somal location.

[0177] Although we also did not observe robust axonal outgrowth directed to the optic nerve, we find that many genes important for axon growth and guidance are expressed in the RGC-like cells. It is possible that some key guidance factors are not expressed in these cells or, alternatively, that the adult retinal environment no longer expresses the guidance factors needed to direct axons to the optic nerve head. RGC transplant experiments have found that, in some cases, the RGC axons project ectopically, suggesting that the microenvironment of the adult retina may not fully reflect that of the developing retina; future studies will be needed to better understand the interplay between cell-autonomous factors and nonautonomous factors in regeneration.

[0178] Over the past decade, a number of reports have suggested that other developmental TFs such as Sox2, Pax6, NeuroD1, Neurog2, and Ascl1 can stimulate neurogenesis from glia both in vitro and in the brain (39). However, the interpretation of many of these reports has been clouded by the finding that lineage tracing new neurons is unreliable using existing Adeno-Associated Virus (AAV) paradigms and often leads to endogenous neurons being misidentified as glial derived (40, 41). Nevertheless, some of the earlier studies that used alternative methods to trace glial-derived neurons were able to show that reprogramming of astrocytes to neurons is possible, and proneural TFs, including Ascl1, are among the neurogenic stimulants (42-45). Thus, it is possible that the strategy of combining TFs from a specific neuronal lineage, as we have used for the retina, will have applicability throughout the CNS.

[0179] Overall, this study provides a proof of concept that TFs used to specify cell fate in development can be harnessed to initiate similar fate acquisition from reprogrammed glia cells in the adult CNS. The re-engineering process of cell fate acquisition during endogenous regeneration strategies will be key in guiding neural replacement appropriate for specific neurodegenerative diseases.

### REFERENCES

[0180] 1. L. Todd, T. A. Reh, Cold Spring Harb. Perspect. Biol. 14, a040816 (2022).
[0181] 2. A. Hamon, et al. Dev. Dyn. 245, 727-738 (2016).
[0182] 3. A. Bringmann, et al. Prog. Retin. Eye Res. 28, 423-451 (2009).
[0183] 4. N. L. Jorstad, et al. Nature 548, 103-107 (2017).
[0184] 5. N. L. Jorstad, et al. Cell Rep. 30, 2195-2208.e5 (2020).
[0185] 6. T. Hoang, at al. Science 370, eabb8598 (2020).
[0186] 7. E. M. Rueda, et al. Cell Rep. 27, 1637-1649.e6 (2019).
[0187] 8. K. Yao, et al. Cell Rep. 17, 165-178 (2016).
[0188] 9. K. Yao, et al. Nature 560, 484-488 (2018).
[0189] 10. J. Pollak, et al. Development 140, 2619-2631 (2013).
[0190] 11. Y. Ueki, et al. Proc. Natl. Acad. Sci. U.S.A. 112, 13717-13722 (2015).
[0191] 12. L. Todd, et al. Cell Rep. 33, 108507 (2020).
[0192] 13. L. Todd, et al. Cell Rep. 37, 109857 (2021).
[0193] 14. C. Powell, et al. Sci. Rep. 6, 24851 (2016).
[0194] 15. F. D. D'Orazi, et al. J. Comp. Neurol. 528, 2816-2830 (2020).
[0195] 16. G. Beykin, et al. Prog. Retin. Eye Res. 80, 100875 (2021).
[0196] 17. Y. Elshatory, et al. J. Comp. Neurol. 503, 182-197 (2007).
[0197] 18. L. Gan, et al. Proc. Natl. Acad. Sci. U.S.A. 93, 3920-3925 (1996).
[0198] 19. F. Wu, et al. Proc. Natl. Acad. Sci. U.S.A. 112, E1559-E1568 (2015).
[0199] 20. A. Usui, et al. Development 140, 740-750 (2013).
[0200] 21. B. S. Clark, et al. Neuron 102, 1111-1126.e5 (2019).
[0201] 22. T. Stuart, et al. Cell 177, 1888-1902.e21 (2019).
[0202] 23. K. C. Chang, et al. J. Neurosci. 37, 4967-4981 (2017).
[0203] 24. Y. Jiang, et al. J. Biol. Chem. 288, 18429-18438 (2013).
[0204] 25. T. A. Reh, et al. J. Neurobiol. 24, 949-958 (1993).
[0205] 26. Y.-R. Peng, et al. Neuron 95, 869-883 e866 (2017).
[0206] 27. E. A. Bassett, et al. Trends Neurosci. 35, 565-573 (2012).
[0207] 28. C. Finkbeiner, et al. Cell Rep. 38, 110294 (2022).
[0208] 29. P. Lyu, et al. Cell Rep. 37, 109994 (2021).
[0209] 30. A. D. Kakebeen, et al. eLife 9, e52648 (2020).
[0210] 31. B. W. Lindsey et al. Prog. Neurobiol. 170, 99-114 (2018).
[0211] 32. D. Goldman, Nat. Rev. Neurosci. 15, 431-442 (2014).
[0212] 33. F. Wu, et al. Nat. Commun. 12, 1465 (2021).
[0213] 34. N. L. Brown, et al. Development 128, 2497-2508 (2001).
[0214] 35. J. N. Kay, et al. Neuron 30, 725-736 (2001).
[0215] 36. J. Brodie-Kommit, et al. Sci. Adv. 7, eabe4983 (2021).
[0216] 37. X. Mu, et al. Proc. Natl. Acad. Sci. U.S.A. 105, 6942-6947 (2008).
[0217] 38. L. Pan, et al. Development 135, 1981-1990 (2008).
[0218] 39. R. Bocchi, et al. Neuron 110, 366-393 (2022).
[0219] 40. S. Blackshaw, et al. J. Clin. Invest. 131, e146134 (2021).
[0220] 41. L.-L. Wang, et al. Cell 184, 5465-5481.e16 (2021).
[0221] 42. C. Lentini, et al. Cell Stem Cell 28, 2104-2121.e10 (2021).
[0222] 43. O. Torper, et al. Proc. Natl. Acad. Sci. U.S.A. 110, 7038-7043 (2013).
[0223] 44. C. Heinrich, et al. Stem Cell Rep. 3, 1000-1014 (2014).
[0224] 45. N. Mattugini, et al. Neuron 103, 1086-1095.e5 (2019).
[0225] 46. A. Butler, et al. Nat. Biotechnol. 36, 411-420 (2018).
[0226] 47. A. T. Satpathy, et al. Nat. Biotechnol. 37, 925-936 (2019).
[0227] 48. T. Stuart, et al. Nat. Methods 18, 1333-1341 (2021).
[0228] 49. Y. Zhang, et al. Genome Biol. 9, R137 (2018).
[0229] 50. S. Neph, et al. Bioinformatics 28, 1919-1920 (2012).
[0230] 51. J. Cao, et al. Nature 566, 496-502 (2019).
[0231] 52. C. Y. McLean, et al. Nat. Biotechnol. 28, 495-501 (2010).
[0232] 53. N. M. Tran, et al. Neuron 104, 1039-1055.e12 (2019).

### Example 2: Promotion of RGC Production Using Transcription Factors Specific to Developing Retinal Cells

[0233] To determine which transcription factors could aid in promoting the production of retinal ganglion cells from Müller glia, we used lentiviruses to induce the expression of several transcription factors that are expressed in developing retinal cells, but not in Müller glia. The Müller glia were grown in cell culture and infected with the viruses. The cells were then cultured for 5-7 days and then processed for single cell RNAseq to determine their fates. We found that of all the factors tested, Onecut1 (arrow in FIG. 15) was able to induce the Müller glia to generate new cell with the characteristic gene expression of RGCs, including Nefm, Nefl, Ebf1 and Gap43 (FIG. 16).

### Example 3: AAV Delivered Reprogramming Transcription Factors can Induce Neurogenesis

[0234] FIGS. 17A-17C. illustrate the protocol used to demonstrate that the lineage of HuC/D+ neurons was traced from MG by tdTomato. Immunofluorescent markers showed successful delivery of reprogramming transcription factors resulting in HuC/D+ neurons reprogrammed from MG cells. As shown in FIG. 18, both Atoh1 and Atoh7 delivered by AAV can induce HuC/D+ neurons. Atoh1 and Atoh7 are about the same in efficiency. AAV delivery of reprogramming factors under these conditions was much less efficient than transgenic expression.

[0235] We have tested 5 additional RGC transcription factors: Irx2, Irx5, Neurod2, Ebf1, Tcf3. Of these, Irx2 and Neurod2 promote axon growth in IPA reprogrammed MG (FIG. 19). This shows that certain RGC transcription factors can increase some specific RGC genes.

### Example 4: Human Muller Glia can be Generated In Vitro from Fetal Retina or Pluripotent Stem Cells

[0236] The protocol for Embryonic Stem cell (ESC) differentiation to generate retinal organoids (RO) is illustrated schematically in FIG. 20A. Images of MG development in retinal organoids over time labeled with RLBP1 and SOX2 are shown in FIG. 20B. The upper panel of FIG. 20C shows the schematic protocol for the generation of retinospheres (RS), and the lower panel shows images of retinospheres made from several fetal retinas and cultured for various times as labeled. Characterization of the MG in RS with RLBP1, VSX2, SOX9, SOX2 and GFAP is shown in FIG. 20D.

[0237] Human MG can be reprogrammed with ASCL1 to generate neurons in dissociated cultures (FIG. 22). These neurons express some pan neuronal markers such as DCX and TUJ1, but are not mature. Human MG can be derived from either retinal organoids or fetal human retina; both glial sources respond similarly to ASCL1.

### Example 5: Promoters for Driving Expression in Muller Glia

[0238] The characterization of ShH10 capsid and RLBP1 promoter in non-human primate (NHP) Muller glia is illustrated in FIG. 23. We have found that the human RLBP1 promoter works very well to drive expression in Muller glia (mouse, human or NHP), but, it is 2.8 kB and too cumbersome for 2-3 reprogramming TFs. Thus we began working with a much smaller promoter. HES1. HES1 promoter provides a good alternative to RLBP1 promoter. HES1 promoter is only 337 bp, it is expressed in adult Muller glia, and in retinal progenitors. In addition, HES1 is increased in expression after ASCL1 infection. As shown in FIG. 25, HES1 promoter drives very good expression specifically in Muller glia in human retinal organoids. GFP is expressed in HES1 and Sox9 positive cells seven days after the infection with the Hes1-GFP construct. The construct is specific at 7 days. FIG. 25C shows that GFP is not expressed in OTX2 positive cells (HES1-GF), however we do obtain GFP/OTX2 positive cells after the expression of ASCL1 (reprogrammed cells; FIG. 25D). HES1-promoter also directs GFP expression in MG in adult NHP dissociated cultures, as shown in FIG. 26.

[0239] This small and specific promoter offers the potential for a single AAV virus to drive reprogramming TFs in Muller glia. We made the viruses shown in FIG. 24, along with a more complicated “auto-regulatory loop” virus to allow us to track the reprogrammed cells over time. The HES1 promoter shows specificity. The related HESS offers another alternative.

[0240] Throughout this application various publications are referenced. The disclosures of these publications in their entireties are hereby incorporated by reference into this application in order to describe more fully the state of the art to which this invention pertains.

[0241] From the foregoing it will be appreciated that, although specific embodiments of the invention have been described herein for purposes of illustration, various modifications may be made without deviating from the spirit and scope of the invention. Accordingly, the invention is not limited except as by the appended claims.

The application's sequence listing, which the Patent Office published only in electronic form, follows.

SEQUENCE LISTING (71 sequences)

SEQ ID NO: 1 - DNA, 35284 bp, Homo sapiens
  source 1..35284: mol_type = genomic DNA
  CDS join(453..1557,32490..32782): protein_id = 2; translation = MNAQLTMEAIGELHGVSHEPVPAPADLLGGSPHARSSVAHRGSHLP PAHPRSMGMASLLDGGSGGGDYHHHHRAPEHSLAGPLHPTMTMACETPPGMSMPTTYTT LTPLQPLPPISTVSDKFPHHHHHHHHHHHPHHHQRLAGNVSGSFTLMRDERGLASMNNL YTPYHKDVAGMGQSLSPLSSSGLGSIHNSQQGLPHYAHPGAAMPTDKMLTPNGFEAHHP AMLGRHGEQHLTPTSAGMVPINGLPPHHPHAHLNAQGHGQLLGTAREPNPSVTGAQVSN GSNSGQMEEINTKEVAQRITTELKRYSIPQAIFAQRVLCRSQGTLSDLLRNPKPWSKLK SGRETFRRMWKWLQEPEFQRMSALRLAACKRKEQEHGKDRGNTPKKPRLVFTDVQRRTL HAIFKENKRPSKELQITISQQLGLELSTVSNFFMNARRRSLDKWQDEGSSNSGNSSSSS STCTKA
aacagtaacagagccatggctcaagctggccagcggggcgggcaggcagcagacgcggcaggcgcgcgggccgcggcaggggagccggagacctcagaattttaagaaagagaggggcgagaggtggccgaggcgggcgggctggggcactgcgctctcccaacggcgcggatcctctttggaaattaatattaaaaaaaaaaaagccgaggacgcagaggggaaggtggggggtaagagggaaggcgagacacacacacacacacacacgcacacgcacacacggacacacacacacggagagagagagagagagagacagagccccacagtgagaggaaggaaggcaacagtcgccagcagccgatgtgaagaccggactccgtgcgcccctcgccgcctctgcctggccacatcgatgttgtgtccgccgcctgctcgcccggatcacgatgaacgcgcagctgaccatggaagcgatcggcgagctgcacggggtgagccatgagccggtgcccgcccctgccgacctgctgggcggcagcccccacgcgcgcagctccgtggcgcaccgcggcagccacctgccccccgcgcacccgcgctccatgggcatggcgtccctgctggacggcggcagcggcggcggagattaccaccaccaccaccgggcccctgagcacagcctggccggccccctgcatcccaccatgaccatggcctgcgagactcccccaggtatgagcatgcccaccacctacaccaccttgacccctctgcagccgctgcctcccatctccacagtctcggacaagttcccccaccatcaccaccaccaccatcaccaccaccacccgcaccaccaccagcgcctggcgggcaacgtgagcggtagcttcacgctcatgcgggatgagcgcgggctggcctccatgaataacctctataccccctaccacaaggacgtggccggcatgggccagagcctctcgcccctctccagctccggtctgggcagcatccacaactcccagcaagggctcccccactatgcccacccgggggccgccatgcccaccgacaagatgctcacccccaacggcttcgaagcccaccacccggccatgctcggccgccacggggagcagcacctcacgcccacctcggccggcatggtgcccatcaacggccttcctccgcaccatccccacgcccacctgaacgcccagggccacgggcaactcctgggcacagcccgggagcccaacccttcggtgaccggcgcgcaggtcagcaatggaagtaattcagggcagatggaagagatcaataccaaagaggtggcgcagcgtatcaccaccgagctcaagcgctacagcatcccacaggccatcttcgcgcagagggtgctctgccgctcccaggggaccctctcggacctgctgcgcaaccccaaaccctggagcaaactcaaatccggccgggagaccttccggaggatgtggaagtggctgcaggagccggagttccagcgcatgtccgcgctccgcttagcaggtgagccggccaaggagctgggcgcgcgggagataaggtacacgaaagccgaagggaccaaaggaggaagggtaggagagagggctgggtgcgcttcatcccgcccgcccctacccctagaagggggactccctgtgcctggaagggccagcacagggctgtgggagcaaattgcctactccagggctcagggtgttgggctgtggaaggctccgagagctaagcggccgggcctcggcgactgaagaggctcatttgcgctcagggacagcgagggaagctcgtacggcctgaggcggagagaaatccccgcacctggtgagacactctgcgccacctctcagttcagcgatccgggtttgggaagagggatgcaacgcgtgcgtggaatcgcacgcaaatgttcctcgcaggtacctctgacacatcccaggcgctgggctggagcgtgccggagcagcgtcgatgtttggccgaactggctgctgtgaccccctcccgcgctcattcttttggcgctggctggggtgacctcaatctaagagtatgggcaaaaagtttcagagccattgggcggtgggtgtgtagcacagacgagttgtaagggttaggacgctctctgcgcatggaattggctgtggaaaggagagggaggctgaccgtcccaaggtcccagtgagagctgcaaagcaatagccatgtcctgggaccgactccgctgccgactccctgaggactttgcattttgttttattattcctcttcgcgattttcgtctgaatccccgtgcgggaggggggtttggggatgagagtgtgtaaatgacccccaagtctaggagcagaggtctcctgcccgaaaccccaagccccaggtgtttctgagttcagctggaagctctccttggcgcagcgcagacaccgcgcctggctccccgagaccgcggataggcagagaagaaagctgagcccagcccgaaccccaccggggatttcaggaggattcggcgacccttgagggtagagaacatgaggggaggtagagctaaggacagcggagggtggcctgggtttgatgagatccggccggcggttgccaagttgattgactcctggtccatgccccctccccccccactcccccaccccccacctccacctccatctcagcccagcgcccaggcctgagccttggcgaagagaaaaggtaaaagccggaatgagggtttgttaattaactgatcgttctccattaattcgtccctggagaacgagagacagtcaatccgctctgagccgggggcactgagccgtttcacagtctaaaatcaaagcgtgaggccaaagccccctcctccaactcgtgcctgccaatgagaagctgggggtggcaggtgccgaccagcctgcgattcgtgccccgaagcgacccaaagcgttctttgggtttgggcgctgcaggccaccggtcccaaagcaccgcgctggctgagactctgccctgccaggttttccagcccagctctgccttcgttcgccccaggcaaagtcctcatgcaggttcctgcagcctgcgcccgggaaccagtcaggggagaagaggctcgctgggcgccccagcgaatcgctggcccccggttttccactctctagctcttgtgctaccggcaccatatctccacccgtgggctgcccgcgagcaactgaggttccggagggagtgggcgaaggggctgctcctcgtcctgactgctccgtctctccagagcccaaggtagtgccttttcacacacccacaccaccccagagccaggcttcagggcctcttacccaggcagtgcccgctgaagccaaagagtggagcgggggaatgtgggaagaagatagaaatggagaaggctacccctccgggaaaactcggtccccatcccccacccccgccccctggaggctcttgctctggacttcaatatccctcctccccccactgcctgctgtcgccccctggaaggacagactgacacgttctgttcagagacgacctctgagccatggaaacctggccgcaggagcgccctctgacctccaagcgtggagagctacatagccgagctcaggggacggcactgtggagggggagggagcctgagtgctgggacccgcacgctggaggcgcaaacatggtgcctggcaggtgcttgtggcacccaggaggctatcgaaggagcgcctgcctgggcacccagcaacctgtagaggtccatgcagccctcggccctaggcccatggccttttcctcgaaaaagtgaaacactggagagtccagcagggcaggcatttggcaccaaacaccaagccgactctgtgtcctgagaccctgaggaagcatgtctattacatttttgtttccttaacttaaaagggatggtggaaagggctaggactgaggattctgtgttggtccaggagggtctcctgcaaggaaccaggaacagtctcttcacaacctatttttaagttactgaagaaggagccatctcattaacattttcatattttaaaaagagtggggttattttctgaactttccaaatgatctctaacgggccaagtgcatgagccttaaaatggattgcagagcgccttggccgttcctacgggacattagtgcctgccccccactaccagctcccatatggggaggtgcccctggcagctttccttgctgttgcgctcagagaccctccccagtctcgttccaaccaccttgcgaggtcagggctcactgagctcggttccttcgctccgcagcgggagagtggtggcttctccacgcccctctgtcctccagttgccggcagcctgttgcagagggtcaaaaccctcttgcacgtggcgctgtgtttggggaggcgccttccggtcacgaaataacagcggctggtggaagaagggcgacaggaggaaattcccaccaaattaactaccttttaaaaatcaatatatgttccctccatgtactacttgctgctgccccattaaagagcagagcgacagggttctcgccgcgtctcctccgggatgaggcggggggtgtgggtgggtggcgcgcctctgacgtgggcgtctatcaagaccaagattagtttccaattaaagattccagagggcttcggccacacagcaggagctgccggctcggaaagagacagcgacacacacccaacagcaagcgcagcaccgcggacccaggggaaggcggcgcgcaggcccgaggttcgggcgggggtgggtgttgggcactccgaccctgccctgcgggacttggaggcgaggaaacctccaaaccccgcgggggagttggcggcgcccccttcccgtccggtgtttgccccagaacgacctaagaaggacctgagccaaggggggaggggttcggtcggggggcggccatgagaaagtctcgcccagcccaacctgggctgtgtttgccctgagtggccttgcggcctggttgattgataactggcccctgcacaagtccatttgcttttttgttaatatttatcccggggtgacatttcaaatgtccccctgcttttctgggccatgggagtcaggcaggagtgcggggccctaggcagagcccttcaatccttgaagacttctgggccgggagagaagccaggactgggcgtgtgggacgcaggagctggaagcgttcctgggtccaagagttgggggagaaggagtcaagcgcagcggtttcctcgcgcttcgcgtcttggcgctgtgggtctggtgtcgcgcagctgctcccagcccgctgcggcgcgaacaaagggccagcagggcgcgaccgaccgtgtccgcctctgagcccggggcgaggggcgccgccagctgggagcgcctcctccgaaggcctaggatggcctcctacggagaccaaggagtcccagagcccgccaggccgaaaagtggcagtgcatcccggtagtcaactggggaccctcacacacacacacctagccgactgcaaaaccaaaaaaggtctcgctcctgcggacagtcaccagaaggctctgcgtggtgcctgtctcacggccggtgtctgtcccctcgagggtgtaggaccatagttccccctgtgtagttctctctgtgtaacgggcataaacccgggtgaggagagggaggtgcgcttggggataagaagtgggctcgtggcgacgactggaaccgctatggctggggcaggggaaacctacttctggggcttaaggggggctgatggctattgtgtggcgaccttggtgtcagcgcagctaggatgcctgccagagacgaactccactacctgttcggaggtatgcggctatcccgtcaatgggtgcagcacctatcgccctggaagcatccggagagggatcccggtagctggggcgaccagcctgacccagggcacagcggttgctagagacccagccccgacatcgccgcttaccaccgacacttgggtcggacagtgccaacaatagcacggttgtgttgtagcagcagaggacccaaatcccaggatgcgcctctccttatctgcaagcctcgagccctccgcgctccctgcttccctccattcggctccctttctgggggtagccgggctgtgctgcggctgcggcgcgcgccccctgcgggccgtcggggctgggcgacccgcgagcgtccgtggttcagcccgcggcagcgaagaaagggatgcttgctgcgcctttgtttttagaacgtcgttgttctagtgaatttcaaaacaataactattttgataggaagaaagtgtgaaggaggaagagaaggatatctagagggtctgtcggggtacctaacaatgcctgggtgttacccaattcatgaaaacaaaattctcatcttccgaagtacacctcagctctaacctccccaaaaaagatgcgtacttggattttgtatccgaagtatgcttttgttggcgtgttttcatttaagaaaagcggggtcagcgtagagaaggtgaccctggcggtccgaagtcggaggttggagctgagggatataatacccggcggattggcggttcctttgttttgttgtttcctcttcctgcaaactgaccggagtcaggaggcagccctgaggccttgagctgagaagtctttgtttcctcttgtgtggggtgggtgaaagggccttcggaggccgactggtctggagccctggcgcggagtcaggaccctggacagggtcccaccgccctgacgcctggtcccatttctcttcgccccggtaggcagatagaatgtctttgggaagtcatagtaagaaaacaaaaattaacagctaaagttccgaagtttcttagggcgctaggcccagccgggaatatacactggcacactgaggtaatcgaaaagatcaaacctatcctcgtcgatcgggtggttgatcttttcgtccctccacgcggctttgtgtgagtatctgagtgcacgtgcacacctgcttataaaatcggaattcgcgtccctgtgggtgtgacaggggttggatcattaagctaaaacgttcaattcagtccctttgatccgcgctggggaaaatctatagtcatctctaatctacgaggtctttaaggaggttgttacacgagctgttttgatgtcattatttccacattcatggcaaattcagctaatcaaacaaatgctgctaccccaagttatcagaagaaatcgttcttacagagcataccaataaaatttatttctgattttcttgtaagacagaaaatcctcaagtctaataaaggtgggtaattaagaaggaggctctccaatatcctgctcctcagcttgaggccttgttcctcaagtgacattgcttgtgctctttgtaaagtccatttattggaatatttaaacaccgacttaatattttaaatcaatctaggagccttgatggtttgaatgagaaatgactagtttcctttcagtccccattaaaacagcagaatttccacactcttggtaaaattgaatggcccccaacctagggtagcaacagaaggaaggtgttactgaagttgtggttgttagagggtgcatttcttataatgctggagaaaacatttaacaaatatttattaaataatactctcattgtgtctctatttgaataagatggataagcatctttgggagaagaaagccacattatttctacataaaaaatgtcagtctcatagagtccagtaaaaagaaaaatatttcttatgtgaatggatttagtgcacaatcataaattcctaccttctatcaataggtttgtataggttcttattttaatacaagtatgttaatactaacgaagtttaatttcctcctgagataataagattgggctaggtgactagaccaatcacaagacaatctgattattttgatacaaacataaaaattacttatcacagggtcttgctatagaagcatccacatatgtctcttccaagagatgttacggtatcataaaattgtaacaaattaatttctagaaattttcttttcttaatagctaatagatgctgggcttagtaccaagatgatgggttgatctgtgcagcaaaccaccacggcacatgtttacgtgtgtaaaaaacctgcacatcctgcacatgtaccctggaactcaaaataaaagttgaagaaaaaaagaaattttcttctcttttagatgaggcaatttaataagacaacagctggacagaactagaccctaaagtacaaccaatctcatttgtcatagtaactgataaggaagaagcttaagttttttgtgcacattctatttgttgggtactgtgatcggaacatagatgttctcattgaagactcaacatttataccagtggttcccaaatcttgctatacattggaatcacttagagacctttaaaaaaactgatgcctagctgcagcttcagatattttgatgtaattggtacaggacgtgacatgggcattggatttttataaactcccaggtgattttgatgtgcagccaagtttgggaaccattagtctaagtggtatttaccacttttttccctgttgctctcttcagtgaggttaaataatttacttgtgataacaccactggaaaacagtgatgccctgagctcagctttcccagtccaaagcccagaacattttatcctccatcccatgcttctgttgccaggacaggtgcaccaggttagtggagtcagaatgtggaaataactgattcaaaagtctctacataataagctcttgaaattagagaaagtgtgtctttcctttgggactctcaaaaagagtcacttatgaaaacttatttcttttatactcaagacttgtaaaagagattttttattactcttttttgaagaagcagccagaaaatgtgaggaagtgccagaagtagatgtgaaaccccagcctcccatccctttgttcacttaaacaattattgatggacaagacctatctcattagatgtgcctgtgggtggggctggtccattcggtcccttgccttgaggggggcccaagggctcagatcttcccataccttcaggcattggcattctgatctgcacttggacagcaattacacttcttggctccacatcagtgcctgccttgctatttcaaagattgcctgtaactcaaattttagggctctgcactaaaaagtaataaattgaccaaaacagagtatataggctgggagttgtctagagggcatcttgcaatttctgtcaaacactgcatgtttccagtcaccatgtgtttctcatcttcctttgcatatgccgccacgggatattcagaatcgacggtttctgaaatcactgctttcgttttcacatctggtgatgatctcatagtcccaaagagaggttatcgaaggaacgcaataaactatgtgctttttgctttctttcctgttgtcttctaaaacagatcaatggggaaaattaaataaacaaacgagcgaagcgcgccacctagtgacctctgtgctcgctgcagattctgcgactgaagtgcgtgagaggagtggctaaagcgattcgagtattgatggagtcacaaaaatcgttcattaaggcaatttaatctttgctattaaatgtcctttcaattcatttggggtaattaagatgcagttaaagtgattaaattctaattacttatgctagacaaagacatatttgtcacactaatgcggttaactaaggactcagaaagaaagttaacatttacttcaaatgatgcaactggaaaaatcagttcctcttttcatcattaatccagtgagctgggtgattatgtaatggcactaccagctcattaaaagggggaagtgctgattaaaatgactgctaggaggaaaactggaaccagaagtacctcagtactgtttggtcagcattcctgcacaaaattacttggtgttctttccctccaagccccccaccccagagtaataaacagctcctgagtttcatcctgacattaaaaaagggctgcctcacagaaagcttttagcatctgcctgcagacgttgttaaaccaaaagatttgtttaaatggtaaaagaggacttggtgtagagaggaccaggcagatgggaagggatagggaggaagagaattcctgaaggacacagctccagaaggaaaatttccactacaggcttcaaaagccccctttgttcacaccaacacccatcctgttaggaagcactccttttcctccccagctccacatttactgtctgatggatggagacagatgcctctgccctagacttatataccacactcggttattatgcatactctggagagcgctaagtacctctgctgaagattggtctctttttggcatttttccacattcgcatgtggattagaaaccgtcaagtcacggaggctagtttgccatatctccatagatcgttcccagagtcttagtatagcctaattatgagtgctcctaaggggaagatgattttaaatttaatgaatttaaagttttccttacaaaaatggctttttaaggaggcacctagtatttgcctggtgggtatggggaatgatccaaggacaagaatgatcaatcagataattggggactgtttatcccccaggagaccagtgtctcttaggagagttaaatttgcatattgaaactataattttggtttctttatcccatcgaataatatcacccgtctttataaccaaagaaatgaaagttatcaaattcatgccacttaagttaaacaagttttttttttaaataaactggtcggccaggcacggtggctcacgcctgtagtcccagcactttgggaggccgaggcgggcagatcacaaggtcaggagatcgagaccatcctggccaacagggtgaaaccctgtctgtactaaaatacaaaaaaaaaatattagccgggtgtggtggcctgcacctgtagtcccagctactcgggaggctgaggtaggggaatcacttgaacctgggaggcggaggttgcagtgagcctagatcacaccactgcactccagcctgggcgacagcgagactccagctcaaaataaattaattaattaaataaactagtcagttatttgaatatttacagtcattattaatgtaatggatcgtattacaccatcttcagttacaaaaaaaaaaaaaagaaaaccctctctggattaagaataaagtgccccagaggaagatttctgtagtaattagctcttagacattgtcaagtaatttaacctttctgggcctcagtctcaataaatgtagaatgaaggatttggctttagggtcccttccaggtgtcacattctatgattgattgccttctatgatgactatgtatctatccatggggaagcttagttggggccctagtctcttctaagtttagtgctctgtctgcagtttcaggtctcaacaaagtgtaagcctcagggggccagtcccttgtcaggtggtcaggaggaaataacctatccaggcaggagctctgccttctggccccaaagtgctgcagcttgagattccattgcttgtgttctagtaagacaagctgttagcaaggatatgggtcattaggaactcttagccactactggtggaaacgaaagtaaattggcaccttcactacaaaaacatagtgtcaatgacttggcatcatcttctcaacctggacctacatatatctagcaattctaccctttggcatatattataggtaaattcataaatgctcttagagacatgcaaagactgttcttggcagcattgttcctaagagcagaaaaactgaaaaagcctaaacgttcactgacaaggaatgcataaataaatcatgatatataaaaactatttttaaaaaaatgagtaataaacataaatttagaggataggggaaggcagggagataagaggcaagaacaccctgtagcttcacaaggcaactaatgttctagttcttttattgagtggtggactcatagatgttcattttgtttttgtgcttcatatcttacatatatgatacatattgtttggtaggcagtgattattatttatttttaacattgaggaggtagaaacattgtttttgtctgattcctcaacccaagcaattcagaccaaacaaacctcaagacatactctattgtcatttaagcaggttctagccccatactaaatatcagctctcataggaattacattcagccatttttggacgggaggataaaataagtaaaagagggaatttcattaaatatggaaaaaagagttaattttttcactcatttgagcacctgctgtagcaagttccgtgctcaggaccgggaatggaatgtacaacacaatttttctttggaactcacagtctagcagggaagagaacaaataactttacatgtttttttgtgtgtgtgtgtgtgtgtgtgtgtgtgtgtgtgtgtgtgttttccaggaaggaggagtttaaggtgtgatgaagggacaattttgaagatctggaggatgagtaggacttgggacagaaatggaggaagaagtttccaggaagagggaacaacagcatgcgtgggggccctggctaaactccttttgtagaagagctcttagatcagaattactatgaagctaaaagcttgtttctttcccagcacagctgagtgacacaaaacattgccatcaattacaaaagcattctccaaagctgtggttttcagtggtagggagccatggactgagggtgtcctattcctctagaagagcaaatcagattggagggagagaaggggggagaatatgtgctgcttaaaaagtttccccggtgattctaatataaattcaagtggcaaattagaataatggtattgagaatttaagggtagatgactcttatttttactcccttttcctacttacttctggaataacctatagctctgtagcttactctgtataactgtgtgtttgtgtgtgtttataaaatcttttacttcttttgatctttttgaaatcaaaagttcactcaaaacttcaagatccttagaggaataattgattcaacatgctcctccatctaaaaaagttattaatgttctataggtcctcactactcaaagtgtggctccctaaacagcaacatcgacctcacctgggaacttgtaagaactgtagaccctcaggttccaccccacacctactgaacctgaatctgcatttcagcaagacccccaggaaattcttgtgtccattaaagtctgagaagcaccactgatggccatgttacatcactcaaaaggtctgttttccttcattcgcccaaacactgatcgggtgcctcctatgtgccaggcactaggctgagtacaggggcacgaaagaggaatgaggtgtttattgtatcctgaaggagctcacagggaggaagcatgcaggaaaataaataccgacaaagtctctgatctgggtagaaataaagttctgtgggagcagccaggaaaactggaaaggagactgaaaggagatgacaaaggacctggtgtgttggtgcagcccaaaggaagttgtgacctgttgtggaatgaaatggtcagatttgtgcttttgaaagcatgctggagaggaagataatgggaggaaaagtcgcaagggactagctagaagtggcaatagattctgagggtctgattatatgtcattgtcagcaaaggtggagaaaatgggtggcaaaatttgagagctatttctaaagtcgagtagacatggtggagagtgaaaatggaaatggaacaggctccttgcttctggcatgggaagctgggtgcttggatatacctttagctgcagagtggttatgtggatgtcaatataaagatggaatgtttcagaatagttcaccctctcaaatacattcctacgataggtgggctctctggcttctgtacagatttgaggcatccaatcagttagattgtttctgcctcaccggaacctgttacttactgagagagacatgatgtgagcacgatgctaatgaggtgaagattgtgggtcctttgggtccagttttcacttcccggtgttggtgggcagtgatggttactcacattccatccagccacttccctgggtacaaggagccctgaagaaccagtggaaggggttagcccaaatccatccctgctgttagagaaacaaaagtaactccccagtaatggtagctcaagagctgtctatctataaacaaagagaacagcagagtagacagaagcacagacatgtaggtggggcagacaaatgttggaaagtcttggtttgagtcacttacaaatctatctgtgatggaaactaatcagtttaatggcaagcatattttcataagaaaacacattttactttcctccgatctagttattttcacagttgttccataagcaacagacttttttaaagaattgtttttaattaataaatattttgaacatatactaaatgcacatcattattttaatttgaacagcatgaaaatgtatacagaaaaaaacaagttttcctcccaatcatattccctaagtccccaagtccccctcccttagaagaaacccctgttaccagtttcttgtatattcttaagagatagtctatggctctttaagagtgtgtgtgtgtgtgtgtgtgtgtgtgtgtgtgtgtgtgttcctctttaaaaataatcaagggcctctcccatctcccaaaagataactttctagggaaagtactaaatggctcttacttcttttaattatttggccagaaaattgcctccctagaagatgctgcccagtgcaattatctgagtaatgaaattaaaagagaagtagtacagggtgaccacccctctgcgtaggttgaaaatgctcccaagtgcttcagtggtggtccccttattctagcttattctagctctttttttttttttttagacagtcttgctctgtcacccaggctggagtgcagtggcgcaatctcagctcactacaacctccgcctcctgggttcaagtgattctcctgcctcagcctcccgagtagctgggattacaggtgtgtaccactgcaccaggctacaatttgtattttcagtagagacagagtttcgccatgttagccaggctggtcttgaactcctgacctcaggtgatctgcccacctcaacctcttattctagctcttttatgaaagacaattcaatgtgtgaaagatgttcaaaatgcaagcttataaaacattatatctaccatacagtttcctcttttaaagtaataaatacactcagacacaactacaatatcattttggagcactaccctcaacacaagggtggagattttttccaaaaagttaattattgtaccgcttatatatacttttttgaattctgcttttgtcatgacatagccttagtaaattttttttaacatttgtttgatacttaccatgttcaagcaccttgtatcttatttcttaatttatgttttaatttcaatgcttttttaaaaggtaacttctggccaggtgcggtggctcacgcctgttatcccagcactttgggagggcgaggtgggaggatcacgtgaggtcaggatttcaagaccagcctaagcaacatggtgaaaccccgtctctactaaaaatacaaaattagctgggcatggtggcgcttgcctgtagtcccagctatttgggaggctgaggcaggagaatcacttgaaccctggaggcggaggttgcaatgagccaagatcaagccattgcactccagcttgggcaacaagagcgaaactctgtctcaaaaaataaataaataaataaataaataacttcatttcttgttgcaaattattagtattatatacatcctttgagctggagctgcagggtaaaacactaataaagaaaaaaaataaaagaatcacccacagcaccccacacagataaccctctgtgtgtgtgtgtgtgtgtgtgtgtgtgtgtgtgtgtgtgtgtatccttccaatcttttccctatgggatggtacatactactactttgtaacttttcaaactaaaaaatcccattattaaatttatggtggagtatttgaaaacacataaaagaataatggagacaataaaaaatctctggtaattccatcatccctgtcctttcccaaatatatcatgaatagcattcatttattcaacatatagatagagagagaggatatttgcaagagccttccttctctctcattatccatttatgattggagtggactcaggcattccttttttttccagtggcttacaattcattactgtacttaactattttggtgctcaaattgtcccagatttcactgacgagagccctttccctctgactcctgtgtccctatgacaatgcttacatttttttttaactttctggcatcataagatgttccaagctcatttggtacatattctgccccaatcctagaatgtgccacttctttgatgagccctggtttatcctggtggggaaacatgttagagtccaagacagcctaggcactaagtgtgctcatggctttagggtgacttttggttttctaccctctcagacaaagccaggaaacagatacatatacatttatttacacacacatacaaatatgtgtatacacatcatacatacataatatccatgtacgcataaacatgcttatatacgtgctcatgtacgtatttctaaaatcattagttcataccagtacctccacctccaattgcaatatatcctcagaggatttttccctgccttcccccattccctatttatatgtcttttcctgcacagtgggaactctggtacccagtaatctacctctctctctctctctttctctctctctgtctctctcacacacacatttactcatttgctcaatcctgtaatacatctaaaatcatttcaaaattgctttgcccatacccataaaataaacaaacctgcttaaaaatgttttagttaagattcatttgcagttctctctccccaccccacctgccatacccacgccccagcatcacttgggagcttgttagaaatcctatggaatcagaaactctggctagaaactctggcttgtcacgttttaacaagccctggaagtgattctaatgcatgttacagcttgataagcacacgccaaaatatgcagcttgggtttgttatatgcgtatgtgtgtgtgcactcatgccacgtcttattatataaaataacactttaaacatcctctaaatgtaacaaccctaaaacaagcccagtacaaactaatagggttcctgtcacagcatgggtgtggagctgcagaaattaaaacaaaaacaacaaaaaccctccagttctttagttcatctcttggagccagcccggtggataataaggagtggcacaaaaaccttgttcttcctctttctgggcatgagatacacttacttgcccacagggatgcccttcagtcccacagctccctcccttccatgttaggcacttggcagtaaattcagacaagtcaagatgaaggaggccctgtcaattagcgctaaaaagctcacagccattactctgatcttttcctccattctcacccaacttcctctttcatcataatcacagaacaaaaccctctgcctccaatgaactccgtgaacaaacttcacacacatctcgctttttttttttttttttagatggagtctcgctctgtcgcccaggctggagtgcagtggcacgatcttggctcactgcaacctctgcatcccgggttcaagcgattctcctgcctcagcctcccaagtagctgggactacaggtgtgtgccacaacgcccagctaattttttgtatttttagtagagacggggtttcactgtgttagccaggatggtctcgatctcctgacctcatgatccacccgcctcggcctcccaaagtgctgggattacaggcgtgagccaccgcacccggccacatctcgcttttttttcctctgccaggttgtctatgacaatcaatgcagctgggttttacaagtacaagttcactgtggggagagaggagggttacctgggcccagtcccacagaaagatcccacaaagcaggctttcctggacctgaactcacaggaattacctggtattcttctcaaagcacagattcccaggccactcttaagattctgatttagtcagcctgtgtttttgccaaagtatggagtaattctcttgagcttggaaaggtctaaaatactgtcctaggagcaagtggctctccaatttattgggcatccaaattactgagaagcttgtttaaaatatctgcctgtgatgggtgcaccaaaatctcacaaatcaccactaaagaacttactcatgtaaccaaacaccacctgtacctcaataacctatggaacaaaaatgaaaaaaaaaaatttagtgattatcaaaattacatctgttaatacatgctcattgtaaaaaaaaacagacattacttaaagatataaataagaatgcaaacaacatctataatctcaccatttaggaagaaacacaatttatatgttggtatacattcttctaaacttttttccatagatatatacacagacacacacacacacacacacacacacacacacacacttgctttttatgcaaaaatgagatgattctatctatgcagttttgtcatctgcttgtcctttttgtaagatcggatgaatagttttccactgcaataaatatacatctacatcatcattcttaatggctatagaattttctactatatttatttgttcatttattcaataaatgttcatatatagaccaagcactgagctagattctggggatgtagtcataggtaagcaagtctttgcacacacaaatttaccataattcattgattaactccctatagttttcactactataaaaggatctatgatgaatatgtgtacttatatttttgagcacttgcctgaatatagccttagaataaattcctagaagtgttaattactagatcaaaagtaaatatattttaatattgatataaatgcagatcatctttcagaacagttgttccaattgatgttcccatcaaaagtgcctattgctccttattcttgtcaacattgaggattagtaaggttttaaatctttgccaagctcagacaaaaaattaaaataaatgttctctctctctctctctcataaactgacacagagttcatatcctttgccctggatgttcttttatttctgagtgatttgtataaagaaattattgtgtattttacaactgcttctcaatttttgtctttggatttgatttgtggtatttttaagccatattaaagttcatttttttccacgttaaaaaattaattaaaaaacaaaatatcggcttgtgaatctcactctcagagacagtaggtataggatgaggttccaaaatgtgcattgtgaacaagccgcccctttgtgctcccaggcgatgttgatgtatttgggccacacctttactggagttcacgctcgggactctcagcccttgttactcagagtgcagtcccggaccagcagctagacatcacctgggagcttgttagatggtcagaatctcagagtctaccctggcttgccgaatcagaatcttcgtcttaacaagatgtccaggtgatttaagtttgagaagactgatttagaggagtggttctcagccttggctaagtattagaatcaccgagggagctttcaaaaatcccaggcttaggcctctgcgagactgaataaatcagtatctctggagatggatcccaggcacgagtgcttttaaagtttctcagtggttcccatttgcagagaagactaagaacttctgagggtccttccagtctctcccactgcagaatgcaggccagccctgaagcccaggagagagaaatgataccctaacccatggatccagggctctataatagccagaggtcctactcaaaaagcccaatggcttggcagttgccagaagaaaaagaaacaaaatgggatatcatttcaccttatttataaagcattctttgagtctttcatcccttgaatttgaatttcttcaagactcttctgctggagtcatctcattaatttattgttaaggtttctaccacacagactctctggatatttgctgacattatccataaatctgatccttatctcctctctaaggcaaatatggaccagtcaccacccaaacttagcaaggacggatgcagacagtacacctctgccctctggtactcagtggcccctcctgggcacctaaccttggtaaagggaggtgattacctactcccaactaatttcaatgttccaccccaaattagtttcccctgtgccttctgcttctccagctctgttgctctagtctgctccttacctgtccctgagctcacttcagacccagttataggagtggtggcaataccaaggactcagccaacctttactgacttcccagtcagtgacatttcagctatatccccatatattccccatatatatccccatatgtttctgatataacatttcagaaatctccccatggtgccattaaactactgcaaaaatcactatccagtaaagggattaaggctatctcatggaacttcattctatgcacacattttcaaaacttaaaagacttgtgtctcttgcatctctattttctatggagccacatccaacttgctttcccaacaagggtgctgagtatgccaaggaaataatccatgttctagtattacagactgtgtgagagagatgggtaggtaactaactaattatactgtggggaaggtgctctgtgggcacaaaagacaacaactctccctggatgggagaggggatggagaaggcttagcagaaaagaagatgcttgaggttgaccttcattgcacagggatctttttgtatggaaaagagaaaaggaaggacattctggatgtaggagacatcttgagcaaagtagtagggatgtggaggttcatatctaggaatgacttctgagcagtgtggcaggaatgattggtattgagtgggcagtagtagtaggaagtgacatgggaaatgtggttgaggtcagggtgtcaaggtccttgaatatcatggtagagtagccgccaagggctttcatcttgggcttttgggagacccttgtgaaactaattgtatcatgcatgtcattggaagaatagcatttacagtttgattctacagacaactttccaaaaaagcaaacaaggaaaacttcactaatttgaaattaattagagaaaatgtctgatgacttagtgaaaactcaagattgtaggttttttaaagaaattctgttttataactctcaattactataaatactataaagtaacatatacatctattaattagaaaaatgaggtcgataagctaagacttacaattcacaataggcatatatgaggtaaaaataagcatgtaattcatcagatgtgctttttgttttgactgttttgtggaatcatcataataactagagcatctatatcactccaattattggaggcaaactattgagagtcttttttaagtgagggatactgatggaataaaactccaactgatcagccaataacagaagtttaggaatttagaattctaaaagaatttagaaaaatccttttttagttttaatttttaattatggatacataatagttgtatatatttgtggggtacatgtgatattttgatacaagcagacaatgtgtaatgataaaatcagggtaactagggtatccatcacttcaagcatttatcatttcttcatgttaggaacatcccaattctactcttttagcgattttgaaatatacaataaattataattaactgtagtcaccctatagtgccacctaacactgggtcttatgcattctatctaattgtatttttgtacccattaagcatcccctctttatcccccactccccactacccttcccagcctctggtaaccatcattcgactctccatctccatgagttcaatttttttagatcctacgcgtgagtgagaacatgcaatatttacctttctgtgcctggcttatttcactgaacgtaataccgtccagttccaaccgtgttgctgcaaatgacaagatttcattctttttatggctgaataatatgtatatatgtatatctaccacattttctttatccgttcacctgttgatggacacttagattgatgccacatcttgcctattgtgaatagtgctgcaatgaacatggcagtgcagatatctcttcatatactgatagaaatcaaaattcttgagccaaacttccagaaaagagacctattgccctttgctactgaccaaactagcaggcgcaaggccgcagcttctctcttcccaccagttcctttgaagctgcagtacagggggagagcttcatggagggaagggtcaggttgatgggtgtctcttcctgtgagtataaaaactgatgaggctgtgctcaggaaagtgtgtgcacatgcgcgtgaatgaccagcgagaggacgatgccagtatcattgggtacgaaatgcattctttcaacgagaattctcagctaccattctagttcaggtttagcctctatcacagggaaaacagaacaagggagagaagacaaaccttgtggagagaagaactgagatagtctagaatcacaccaaaatagctgtttgtggggtcaaagaaagcgaaagctggtatggttctctgtttccccatagtctgtgcctgcagaggagcgggaggtgtacctcccgatgtcctccagtgctgtcatggggccctgtgctggctcaaatcccagctgtaccattttgctgttggggtgacttgggccagtctcttaacctcaccgagattcaggctgctcattcgtcaactagagagagaataacagtgtctccctcacgcccttattgtgaggcctggtaaggtgactcatgaatggggcttagctcaggagatgctgtccacccctcccaggcccaggcaaccttgtccagggttcccatctctcctgggatgcagctgtggagcttcacctggagaagacaggtccatcaccatgttttattcactgactcaggaaggactccaggcagcagactatgggatggcaggattctgtcctggacagctctgctagagaagcagaccgggggcagggagaggctccaatgactttcccgacctggctttgccaaggccctctgctcccgctctttccttttccattgggtgagctgcttccttcagcttcttctcaaagctgatacacacaaggagacaactatcccatgctcccctgcatccttcctgacatgggactactccagtccctttcccaggccagcatgggtgtgctgtctgctatgctgccagaactccctttgtctcaacttccatccagcccactttcctggaaggccaaactgcagtcctttcagccacatcaagacggatctggctgacaactggcctgctgcttggctgaccaactgctgctgttctgttcaccttgggtgcaagttctctgagctccacttcacccgttccctcagctcttgcccccatttcaccatcctggggaaagtttccatgatgtttcactggtgctgccctctgcttccagggtccagtgaagctggaggcccaagtcccctactaaccagcccgcaggcaagctgcctaacctctctgacagggtttcacctacaaaaaaaaaaaaaaaggaagaatacctatttctacctcacctgagttttgtggggatcacatgataaggttttatggaggtgttttaagcactataaagcaagacacaagggtgagttacggtgattattccccactgggaatgtctgctctctgcatgttcttattaggctttccatgtgtgtgaccaaaagagtttccatagttgctctggctactcacagagacacagcaaacacagctcatgtccagtaggttgtttgggctccacctccctctgctggccatcagtttccagacaatctgtgcaggactttgcttcccatgcaaaggatttccttggccgtatcaattagagctcactcgtgttgcttttcaaatggcacactgggctgtgccctctgaatttgccacttaagagctcctttatcacccaaacaactggggacacagcttataaaaatatacactgcacagtaagatcactcaaggcaaggcagataacattctgacctaggactcctggagtctgagctctaatcctgatggtctcggtcaatccaaaggctctttaatctccacagtgtaggtactggcctggaatacaggctcaggaacagtcctgccatgtttgcttgcatagtttccccttcatttgtctctccctacccccactgcgttttactgaaatctgtttatttgtgtgctcgctcatccacatatattgtctctaagagtttactttgaaaaacagcttcagctgacaagagagggtcttcagggctcaatgcacatgaacagctgactacctcttgtcctttgccacagaccagaaaagggtctctctcagtggcaggtaggggtgagagcagagggctcaccctgtgtgcatggctggctgccgctgctcttacaacttgatagagatgtaattcacataccatagaattcaacccatttaaagtcatccagttagtcacagagctttgcaaccacagtcaattttagaacattttcatcatctccccaaaaaagaagaaccatacctattagtcactcccatttcccaccactaccccttcagccataagtaaccaccagtgtgctttctatccctgtggattttcatattctggcccacatgctttttgatattgttgttccctacccctgaagccccaagctctcctgagcagggtttgcagggatgccatggccaagcccatcaggaatctgggtagcagccctgggctggctcttgagaacttcaggatgtgtcttgccttaccagtgcacccccatctgacccagaggcattggagcagcaaaggggctgagggccgcctggacgtttctcttctaaatccaggcaagacaccccttgcgtgactcggacgtcacagacttacctgtgtgagaacacttggccctgcatgctactgaggggttgcagttttcagcatctacatcagcctttagggtgaagatgctgcatctccagcaggcccttatgacaatgccaagctgtccttagatgtcaaggcagtttcatggtgtcctggacatctcagcctttcccctttactgctctctagtccactttctctgcgatgatgttaggacaacatattctagggcagctatttcgagggagaaaatacttgtctagagtctaaggactcacagagagcaagccacatatgagtggataagctgccagcacacagctcaagcccagctctgtggccactgatagatgtgtgatcttgaccaagtccttcaccttctttgagcttagtgtccccagctgcaaaatggaatacgatggcttctctcacctcacaaaatggtactaagaattagtaagacaatatatttgctctggtttgaatgtgtcccccaaatttcatgtgttggaaacataatccccaaattcataatattgatggtatttgcaggtgcatatccacggagctgggccagagcttgtgtcttcaagagtccaggctcatttaagaagctgtatcataagttcatttggctttattaatgcctcccaggccaatatatgtatgcccacatattcccagacaaattcttggcagacttttgcataatccaatcagcactttatatgttctaaagtcctttgtatcattaagtcaggaaaatggatataagttagtatacaaatgcttgagtgacaactgatcctaagatgttactatatactatgttttagaaagtgtgttctaagacagggcttcttaaactctaggtagtgaaggactagcttgttggtttgtttctaacttccatctgtcctgaatgaataattttgataatacaataaaaaatatattactagagaaataatcacacatttgaatgttgcagcaatgtcaaactgccataaacatttctaattgcttattctcaatattttttactgacctcgttgcaggtcagtagtggttcacagaccagcacaggtctgccaaccacactctgagaaactgttctaaggatcaccattcctaagagaaattccctgaataaagagttctttgatcaaataagtttgggagagcctgtaagctagaaagtgttgatgctcagtaacatattaaagctctgaaaagtcctgcattaaagaaatttggttaatcattaattaattcagcatttcccaaaccaacttgacctcacaactcattgttcacaaaatacctttcaacctcctgcaaagttacatttcttgaaacccacttggctctgccttgcccactataggcaaagcagtccccaggcatgcctgaactagaagtctctgtcctttgcccacaccctcatgctctgttttttttttcttcataatcttttattcccgtggcacacaaagtcatgctctgacttttaccatctttcatgcctacttctacctcctccatggtactcactttgggtgacctcacccataaacatcaaagtcatttgtctgatatactttgccagtgaatcctatagagctgtctgcttgcccaccctcatggaggtgactcctaacagatcttcatcattagtactacctttcaccaacaatggccatctccttccacttaatccagttaactgacaagtatttctctatttttaatggaaactgtacccctacataaaaatattacattcacataaaacatgtgtgttgctcttccctaagcagcactacttcttgtcatactcctttttcattctctctctctctctctctgtctatcttgcacattcctgtcgactctcataacctccaattgggggtttcctaccttacaatgggtaatctctactctgaaatcaattccgtggaaatttcagctctcacagctatagtctggtgaaagcttctagaagtatgacttgtttctgtgggttgctccacttagcctcccctggtcatcggtgactctcagtaagctttagtctactctccattttactgatatctctgctttctttttcagcacctccagctttggcagcatttcctccagatctaatcacatctacttattcgcagacatacccctgccccatacccacgtggatactgatctgcccttacaaccaggccctaggccagggcgtcctggagatacagagcaagtcagccagggtccctgctccaagagaatctcacttccccaggttctggtattgtaacgtctacagtgcttgaggtcccagggcaggaacttccaaactgcatttccccaacattaatattgtataagacattaatcgacagtctccaccaaaaagggttctggggtcaaacaaatttgagaaacagaattagctgtgcttacatatgttatgaatcttgaggaagaggcaatatataatagatttttttaaatgtccttaatctgcaaaccatcttttcaaggaacccctgtttgagagagtatcattcttctgatgccatttgggaaatgctggctcaggggtagcttcagcagacagtcctgccaaatgccaaggaccagactgaagtcattcaaacatacaatctggctagatggaagatgaatatctctttctgatttcccttagctctgccttttgaatgataaataagtcaagtctgtacccaatgctcagttatttactttcccatgagtgagtgttctgtgtaatttaccatctagagacctaatgacttccaagtctatatttctagcccagatctctcccctgaactccagatcccatacatcctgctgtctgctgtacaaccacctaatggagacctttaacagaatgtccagcaaacacatccaatgcaatttgttccatagagaagtggttactatcctcataaaactcatttctccatctgcatttcctaatggccccattactatcatccaaccagaaacctggcagatgttccagactataccttcttagccaagtagtcaagaagtcttcttgatttgaccgcccaagaagttcttctccgattctgccattgtctaattttgggtcctcattacagtggttttcttttctttttctgaaatggaatcttgctctcttgcccaggctgtggtatagtgttgcaatatcagctgactacaacttctgcatcctgggttcaagcaattctcctgcctcagcctcccaagtagctgggattacaggcacctgccaccatgccctgctaatttttgtatgtttagtagagacagggtttcaccatgttggccaggttggtctcgaactcctgacctcaagtaatctgcctgcttcgccctcccaaactgctgggattacaggcgtgagaaactgtgcctggccctacggtggttttctgacttgtattttaggtacagttctctgcaaagcagattatgagtttctgagatgtgcattcagaaaggttttcggagcatgttatggcaaataatccccctgggggtggtgaaggaagtaagactggacagaaggaggagttgaacaacaatgtaggtgcaaaaatagcctcatccaattatatggagtgctcttgaaccagatgactctttagagttgtctcacttgatgcaagggattggggtgagggtccttaaaccaacacatttccactctcctagaccaccacctttcatacccccatctcctacagccccccacccacccccactagatatgggcaaacccccaccccaccccagagtggcataacctttggccaagggcaattcgagagccacctgtcaccaacccttccagcagctggaggaacaagtgcacagtcctgaagggggatctgggtagtagaccacagcacccactgtagcattcttgtccctaatcttgctgctttccagttctccctccacaactccaccagaggggtttttctaagcccaaatgtaatcacactacacccttactcatgcctccccctacctcctccttacctatgagatgattcatatctgaactctgtctatgcacgaagccatctcccacagcctttccttcttgtgtgccctcttgcctcacaaataccaatctactaatacttatcaatccttcacaatgctgctccctctgcagggaatgagctttcccactcctctcactagaaagcctccatttatcctttagggcccatctgagtgccttctctgtaattccttcctgaatatcttcaagcagtagactctgtacactctttttatactcttgtagttaattgcttatgtgcagttatttacttaaatctggcatccttaagagcaaaacctgtgttgtattcatttttaagtcaatgaatcagccatctgcatcagtattgtatgaggctgtgtccacacgggctgactcaaaccaactggagttgactttagtcatttttttctgggacttaatctaggtgcccggtgagggctgtaggcctctgggaggaagaactctatttggagactctcacctggctcaggatgtctataactcgaggctctgagggagttggacatttaataatactgcccgttaggttgatgccgcccctcatggtgggcaagaggcatagcaagtgacctacaggacatgttacaaaaggccataaggcctgccttgcctacaaatctctctttcatgactgagccctcccttcatgtccattctgaaattatcactcttatatttactaatggttggaccagtggccccgtaagtagggtgaatacactccagagcctggcaagcagatgcatctctagaagagaattccatgtctatttatttttattgtatccctttaaaaattttagtattgtgggctgggggcagtggctcacacctctaatgggaggccaaggtgggcagactgcttgagcccaggagctcaagaccagcctaggaaacatggtgagaccccatctctataaaaaaaaaaaattcaaaaaaattagccaggttgtggcagcacgcacctgtagtgccagctactccagaggctgaggtgagaggatcgcttgagcccacggaggcagaggttgcagtgtgccaagattgcaccactgtatccagcctgggcaacagggtgagatcctgtctcaaaaaaatgtctttgtattgtgtatgttttataatgtgcacaatatagtagtatactaacacatgtatatgatttataaataaataatataagggaatatacactcagaactttttttactaagtagcacattgttttaaaaaattggagccttctggattggactctaaagccttgaggcctctccagctttcatcctatgagctctgcagctgatctgttgctgagctaatttgtaccaatggcacctgaagttttacaggaactctgaagtccaggatctacccagctggaaatgaaagggaggggcaggctgaggagagcacagaggctgaatctagccagagctggtgaaccatcaggtaaggaattgagaacctggaatacacagaggcatacagtgaagcggaaggcagcaacaggtaggacagcaatgggagggatgtgctatggaagaatggcaatccctccctccatcacgaagcatgccccgtccatcttccactatggtcatgatgagagtacagccagccagatataaaggtggcagtggctgctctagaacgcctacatagggggctaagaggcagcaatctgattgcagtgagggcataggagccttttcttaaggctgcattcacatatcagagcactatttttacttgggttgtatggttatttgtggatggttgtgaggattgattgatggtggagattgggtggaggggcagtgtgcattgttaccaatgcagccttgatagtcctctagcaggtggaaactagtgagcctcattagggtggaaagagacttatggcatctaaaatcaggagagaccctgatctggcgccaaaccctggggtctgagggctccattgggatgatacattagaataactccatcagccaaaaagcagcttcataatacaggaccagacatgcaagcgcagggaatgggccccttagtgggagaccaagtaagtgatgagggggactccaagagcatggcttgcaaaaaggaggcacagagagaccccagagatgaacatggctaacttggcaggtttagtctcaatgtcgaagaagagcggttcacacctccacagttcccggttccactagaaaatcagtggaagactgtttgatggccatgataaaaaaaactatatacttaactttcttatatacagattttcctggaaaataaaaaagatcagaagggaaacaaatgcaattcctttctactatgtttttagactctgattaggctcttaatattctactggcagcagactataaaccctttgagggctacaaccacttcttgctgacaaggtgttgcatttgtaaagttagcataaacttttgcatacactatttcataccacaacacggcaaggtaggtattcttatatgcattttgaggatgaagaaataaaggttcaaactgattaagttcatttagccagaaacttacattctacaggtgaggaatctgaagcccagatggagttaactgacttacccaggacaaagagcaaatactcatcaaagccacaacccatgcccaggcctcacagaacttcacctgtatcccaattctccattctgctattacactttcctcccagcctccaatggtgcttaaagcagaggtcagcaaacagaaagcaggccatgaggaatggctaacaaattttatgagctctgtctttctactcatgattctcccctagaccatttgttctaacatcttctgtgtttcttcacagcatgcaaaaggaaagaacaagaacatgggaaggatagaggcaacacacccaaaaagcccaggttggtcttcacagatgtccagcgtcgaactctacatgcaatattcaaggaaaataagcgtccatccaaagaattgcaaatcaccatttcccagcagctggggttggagctgagcactgtcagcaacttcttcatgaacgcaagaaggaggagtctggacaagtggcaggacgagggcagctccaattcaggcaactcatcttcttcatcaagcacttgtaccaaagcatgaaggaagaaccacaaactaaaacctcggtggaaaagctttaaattaaaaaaaatttttaaaagaccaggacctcaagatagcaggtttatacttagaaatatttgaagaaaaaaaagcgttatttatagtccaaagaaaccaaagacttagctcacctgcattctgactttgtttggagacacacacttcagcagggcggcgacttggcaagacaaatgatgagcaggaaaacaccactggatctcacaccttcaatccatgaccatcctcgctgtgcttggctgtttagtggtttggagcatagtgattttgagccattgagcggacatcttttaagatcgaactttctcatctgttctaccatgccacgaaggtgtatggtgtctcagtactaccaccaccagtggttacagacttaggcagagctggtcttcagaaatggttgttctataggagtgcaaccaacatggtatggggttgtctgagttcattggattaggagtgtgattttgctcgtctagcctaacgtttgaacctgccaggcccgcaacctaaatgcagattcaaacccagcaaagaaaatttgaatgacacctaaaccagtgcattctctttgtttgttaaggaatgttcagatattttttaagaaatgaaacatgagtccatccattaaaaaaatcacctaggtaccaaagaacacacttaatattatagtgcaggtattttattgcaatgattttaataaccaaagctatttttacacaagatactatgaaaagttatacgtatgaactgatctagctgtaatacacatgccacatagaatcatgactattatttatgactcttgaagcatttgaaatatgagttttcagaactggcaagaaagaatgtagcttcagggaagcaattaatatcatggcagagaggtcgatgcagtacacgtgtacatccagatggcacactccttttcaggatccataaatgtcacttaagtagagagatagacatggttccataatctgttcctagctgagaaaacctgaggatctttccaaagtagtaccccatttttacactagaaaactaaatttaacagggagggtaactaaattagaaaatttgttcaaagtaatgctttttagtaaaaggtcactaaataaagaactatccttagattaattgacttatatttgctttatgcatctggcaccaaaaacctcttttaaatactttacaaatacaaataaagtttaaaaaaacaacattattattcaaatgagctattcagtacttataactatcctaaaaagttatcaaattaacttattgccaatcccagaaattttatgacttggacgtcaacaaaacagcaggtgcaactgagaaatggtggaattggtggaactgtatagaaaaaagccagtgttctggtggacgacaagacttttgatctattggtattaatcaatttatggaactaagaatagcctccaaagcattctgccttctttcttgctactgcatttagctggaaattttataatatagattttgctctctaacagggacagattaaaaactagacctgagcttacaaatacaaaattttaaatttctatttgtccaaatcacttaaccagagctgtagaagtcaaagtcaaaaaaaaaatgaagtcgtattagtggtaccccagtgaatcacttgattcccagaaaaattctctctgaattcagttggactgtaacttatctaagtggatgccccttatgccattaggtaaagaattggatactgtaagttaattaccacccctacttagaactatgaaattaaatgttatcctaatgataagttgttttattgagattcattaaaaatgccaaagaacaaaactgaaccatcttgacacaaaacataactccttagcatcaaatctcagcaccttgtctaggtctgtaacaggcaggcaactagagaggtaaagcaaaaccaacaagccatctatctgtgtctccttcatgtctgctgtcgaatgagaagaggaaaccaacatatacttctcttttgatgaaatacttcatttgccttgacatgttttgttttttgtttttaatttcacccacaactccagcttaaaaatttcccttctaaatatggcacaattatagttcagctattgaaagagaccatttaaatggccacccttcaagatttactaaaaaatagaatcttgtcaatgacataaacaaaaaggaaaaaactgattaacattttctctctctccagggatggagggagccggggatacagctacataatgtatttataatttaggagggaggaaagccttatttatttaaaacgtgataattctaaatgcagggaaattcaagctgtgtctacacacaatcttaccaaattcaataccccaagaaaagaatagcagaattcagacaaccatgttttttatttgttgctagtatatattacccccaaaa

SEQ ID NO: 2 - protein, 465 aa, Homo sapiens
MNAQLTMEAIGELHGVSHEPVPAPADLLGGSPHARSSVAHRGSHLPPAHPRSMGMASLLDGGSGGGDYHHHHRAPEHSLAGPLHPTMTMACETPPGMSMPTTYTTLTPLQPLPPISTVSDKFPHHHHHHHHHHHPHHHQRLAGNVSGSFTLMRDERGLASMNNLYTPYHKDVAGMGQSLSPLSSSGLGSIHNSQQGLPHYAHPGAAMPTDKMLTPNGFEAHHPAMLGRHGEQHLTPTSAGMVPINGLPPHHPHAHLNAQGHGQLLGTAREPNPSVTGAQVSNGSNSGQMEEINTKEVAQRITTELKRYSIPQAIFAQRVLCRSQGTLSDLLRNPKPWSKLKSGRETFRRMWKWLQEPEFQRMSALRLAACKRKEQEHGKDRGNTPKKPRLVFTDVQRRTLHAIFKENKRPSKELQITISQQLGLELSTVSNFFMNARRRSLDKWQDEGSSNSGNSSSSSSTCTKA

SEQ ID NO: 3 - DNA, 3582 bp, Homo sapiens
  source 1..3582: mol_type = genomic DNA
  CDS join(249..536,975..1916): protein_id = 4; translation = MMMMSLNSKQAFSMPHGGSLHVEPKYSALHSTSPGSSAPIAPSASS PSSSSNAGGGGGGGGGGGGGGGRSSSSSSSGSSGGGGSEAMRRACLPTPPSNIFGGLDE SLLARAEALAAVDIVSQSKSHHHHPPHHSPFKPDATYHTMNTIPCTSAASSSSVPISHP SALAGTHHHHHHHHHHHHQPHQALEGELLEHLSPGLALGAMAGPDGAVVSTPAHAPHMA TMNPMHQAALSMAHAHGLPSHMGCMSDVDADPRDLEAFAERFKQRRIKLGVTQADVGSA LANLKIPGVGSLSQSTICRFESLTLSHNNMIALKPILQAWLEEAEKSHREKLTKPELFN GAEKKRKRTSIAAPEKRSLEAYFAIQPRPSSEKIAAIAEKLDLKKNVVRVWFCNQRQKQ KRMKYSAGI
agtttcgggtgccgaggtctgcagctagcggcaagcggagtcaggcatccgttcagactgacagcagaggcggcgaaggagcgcgtagccgagatcaggcgtacagagtccggaggcggcggcgggtgagctcaacttcgcacagcccttcccagctccagccccggctggcccggcacttctcggagggtcccggcagccgggaccagtgagtgcctctacggaccagcgccccggcgggcgggaagatgatgatgatgtccctgaacagcaagcaggcgtttagcatgccgcacggcggcagcctgcacgtggagcccaagtactcggcactgcacagcacctcgccgggctcctcggctcccatcgcgccctcggccagctcccccagcagctcgagcaacgctggtggtggcggcggcggcggcggcggcggcggcggcggcggaggccgaagcagcagctccagcagcagtggcagcagcggcggcgggggctcggaggctatgcggagagcctgtcttccaaccccaccggtgcgtatttctgcataatcaccgcttaaaggcacattttgacagccccctttatctgcttgatgtttttttcatgtctgcacagcaaatcaccccacacctccaaccaattttcccctctctctctcttaagtattcagcaggtcttgcctttcatattaatttttatgacctgggatgttgcctgtgcgcgtgttgtgttgtgtttcgttgtgtctacaggctcactttcctcctcctcctgcactctcggcttctttctgtggcttccctctttttctcttcacctctgttttcaggattattattattattattttaacgatctgggaatgttgtaggcgcggcgacggtgtcgagccctgggccggggcttccggagagagggcgtacaattccctgctgagcgtaatgtgtgccttctacttacaattgcagagcaatatattcggcgggctggatgagagtctgctggcccgcgccgaggctctggcagccgtggacatcgtctcccagagcaagagccaccaccaccatccaccccaccacagccccttcaaaccggacgccacctaccacactatgaataccatcccgtgcacgtcggccgcctcttcttcatcggtgcccatctcgcacccttccgcgttggcgggcacgcaccaccaccaccaccatcaccaccaccaccaccaccaaccgcaccaggcgctggagggcgagctgctggagcacctgagtcccgggctggccctgggcgctatggcgggccccgacggcgctgtggtgtccacgccggctcacgcgccgcacatggccaccatgaaccccatgcaccaagcagcgctcagcatggcccacgcgcacgggctgccgtcgcacatgggctgcatgagcgacgtggacgccgacccgcgggacctggaggcattcgccgagcgcttcaagcagcgacgcatcaagctgggggtgacccaggcagatgtgggctccgcgctggccaacctcaagatccccggcgtgggctcgcttagccagagcaccatctgcaggttcgagtccctcacactgtcccacaataatatgatcgcgctcaaacccatcctgcaggcatggctcgaggaggccgagaagtcccaccgcgagaagctcaccaagcctgaactcttcaatggcgcggagaagaagcgcaagcgcacgtccatcgctgcgccagagaagcgctcgctcgaagcctactttgccattcagcctcggccctcctctgaaaagatcgccgccatcgcggagaagctggacctgaagaaaaacgtggtgcgcgtctggttctgcaaccagaggcagaaacagaaaagaatgaaatattccgccggcatttagaagactcttggcctctccagagacgcccctttcctcgtccgctcttttctctcctctcttctgcctcttttcacttttggcgactagaaacaattccagtaaatgtgaatctcgacaaatcgaggactgaagagggagcgaacgagcgaacaactgagcccaagccggtgagaatgtgaaacagtttctcaaaggaaagaataacaaaagatggtatttgtctgttgtagcaaagttgtccctttgaaccccacctcggcttcttcagaggaagtgtggagatggctgtttgcaggaaggcagacgagacagtgtttaaaaagtccacaagaatgatcaagtaagatttgtttttattcttacagacatcacccgtgttcaagtttaaaagtacactttgcaactatttttcagaaatagaaattgattcaggactaaaactttaaactagagttgatgcttaatgtgatagagacatctctaaagtattttgaattttaaaaaaagatggcagattttctgcatttacactgtatattatatatatatttttattgtggttcttacccccttttccttctctgaagtgttaatgcttaagaaaagagttgcgcctgctgtgttcactgatcttgaaagctattattagattattgcagaacaaccctctgtaaattattaatttatctctctagcaacttaattttgtgcacattctaattaattaaacttcttccgtctaaaaaaagtgggggaaatgtatagctagtaacgttcaaaaaattttgtttgatgagtttaccgaatttttacagctttcctcctatactgtgttccttttgacccatttgtatattctcacttgaatgaagattgtttttttctttgtttttactggtagtgttctgatttgtgagtcgacactcagtaatggatgtcttaatcgtgtagacctgattcactgtctgaagtattgtttacttcgttacatatttaatggggattcccacattgtccccatgacacatgagcgctctcacttacccttacacacacacacacacacacacacacctctaacagaagggaagaagcagttggaagcatgaccgatgcaccattttctagttttaggtgcatttgccacttggtgtttgcccttcagattttagatttcaccaaggtatttcagtcttccagttttcaattgctttgttggctacatgttaatatttataggaatacttcagtttttccttttggaggtttgtttgtagaaaaactaatttgaactataagaaagacagtgcactgcttgtaaattcacattgtttggaaaaattcttttggaacaaaaaattaggtacatgataactggtaccttatctactgtaaatatttcattaaaaatgatgcacacatagatatattcttacaaattttgctgtattgctgttctctttgaggctctccaaagtcttgagttctgtatatggcctggtttcttgtttttattaatagatggtttatttactatggtaatgtattaatttatttttggtgttgttcgattgtctttcattgaagagataattttaatgttttattggcaacgtatgctgctttttcattaaaatatgctattaaaattaaatggcttttaaaa

SEQ ID NO: 4 - protein, 409 aa, Homo sapiens
MMMMSLNSKQAFSMPHGGSLHVEPKYSALHSTSPGSSAPIAPSASSPSSSSNAGGGGGGGGGGGGGGGRSSSSSSSGSSGGGGSEAMRRACLPTPPSNIFGGLDESLLARAEALAAVDIVSQSKSHHHHPPHHSPFKPDATYHTMNTIPCTSAASSSSVPISHPSALAGTHHHHHHHHHHHHQPHQALEGELLEHLSPGLALGAMAGPDGAVVSTPAHAPHMATMNPMHQAALSMAHAHGLPSHMGCMSDVDADPRDLEAFAERFKQRRIKLGVTQADVGSALANLKIPGVGSLSQSTICRFESLTLSHNNMIALKPILQAWLEEAEKSHREKLTKPELFNGAEKKRKRTSIAAPEKRSLEAYFAIQPRPSSEKIAAIAEKLDLKKNVVRVWFCNQRQKQKRMKYSAGI

SEQ ID NO: 5 - DNA, 11283 bp, Homo sapiens
  source 1..11283: mol_type = genomic DNA
  CDS join(225..252,1094..1283,4043..4302,6199..6485,7827..7994,10047..10163): protein_id = 6; translation = MGDMGDPPKKKRLISLCVGCGNQIHDQYILRVSPDLEWHAACLKCA ECNQYLDESCTCFVRDGKTYCKRDYIRLYGIKCAKCSIGFSKNDFVMRARSKVYHIECF RCVACSRQLIPGDEFALREDGLFCRADHDVVERASLGAGDPLSPLHPARPLQMAAEPIS ARQPALRPHVHKQPEKTTRVRTVLNEKQLHTLRTCYAANPRPDALMKEQLVEMTGLSPR VIRVWFQNKRCKDKKRSIMMKQLQQQQPNDKTNIQGMTGTPMVAASPERHDGGLQANPV EVQSYQPPWKVLSDFALQSDIDQPAFQQLVNFSEGGPGSNSTGSEVASMSSQLPDTPNS MVASPIEA
  CDS join(3154..3179,4043..4302,6199..6485,7827..7994,10047..10163): protein_id = 7; translation = MEPIKIVPWLYGIKCAKCSIGFSKNDFVMRARSKVYHIECFRCVAC SRQLIPGDEFALREDGLFCRADHDVVERASLGAGDPLSPLHPARPLQMAAEPISARQPA LRPHVHKQPEKTTRVRTVLNEKQLHTLRTCYAANPRPDALMKEQLVEMTGLSPRVIRVW FQNKRCKDKKRSIMMKQLQQQQPNDKTNIQGMTGTPMVAASPERHDGGLQANPVEVQSY QPPWKVLSDFALQSDIDQPAFQQLVNFSEGGPGSNSTGSEVASMSSQLPDTPNSMVASP IEA
gagtctgccgccgccgcagcgcctccgctccgccaactccgccggcttaaattggactcctagatccgcgagggcgcggcgcagccgagcagcggctctttcagcattggcaaccccaggggccaatatttcccacttagccacagctccagcatcctctctgtgggctgttcaccaactgtacaaccaccatttcactgtggacattactccctcttacagatatgggagacatgggagatccaccaaaaagtaagaggctattttaccttgtggggctcggtgtgctgttcttgtgcggggttctctctcaggcacaggctgaggtgccaagggctctttggagttggagtcattgcctggagaaagagaaaaggtggctttttcttgttgccgccacgcctgcatgcttactgtcggttcttatcttcgggaaactgattgtaccttgtgtgtgaattcgcctgtgtgccctccaaagctctagctttctggtgctaagcggtgatttcctcctggggaatcctgagctctccgagaaggttattatgttgcaaaggtctgcctgcacagtcaatgcccagagatgtgaattagcattagacttgcaaaagagaacgagtgacaactgtatttatgcctgctcttgctaacaatatccagtcctgtgtgctatttaagagcgcgcttcacggaaaatatagacatccctgcgttcacttaacgcttctagtcaaaaccttttctttgacttgacttatccataatctttcccaatgattatagcaaagaggaaggggggggggagaaatacaaaatgagcgggtttgattgcgtgctaggcgtacaaatgtagactattccaatctgcattttacatatattccacctccttttaaaaatgagtcaaggttttgatggcacatttcaattaccatcccaaagtgcaatgctctaaaaaaaaaaaaaaagaaagaaagaaagaaagaaaaaaacctcccagagtacgccctataagagaacgacactaaaagtgtgtttatctctgtaggaagtaaacggttagtcaatcatgtatttattttcatttcagaaaaacgtctgatttccctatgtgttggttgcggcaatcagattcacgatcagtatattctgagggtttctccggatttggaatggcatgcggcatgtttgaaatgtgcggagtgtaatcagtatttggacgagagctgtacatgctttgttagggatgggaaaacctactgtaaaagagattatatcaggtatggcatttacacttctttcttaattttgtgggatttccctgaatctccccactctttatgtattatttggtgtggctttgtctttttgtgaagtttgcctcagtgtagtcatacaagccaaagttaccctgtacatgtgttaaaaaaatcaagctatgctgttcatttcattctttagttgagaaaaacaaaaacccttaacagtggtattcataattccggggtattgaggcttgtttaattactcttggagtttatgatgcacaaattattttcctctttcaccctcccccttacaaaacaaaattttaaaaagatggagaagtttggatttttagctttaaaatagggttgatttttgttgtatagtgcagtgttctgtttgttttagtcctttttaaaattagtagcttacaaattctttggtggcatcaatgcaataggtgaaataaaagtttgaccgaagcatgtttagagatgtactttgaaagagcgagtacaggtattgctccttttatttttggggtaagacctccttctgagaaaaatttaaaaccaacctaaatattccttggaaaaaacaccggaaacttaatctttttaaatattaaccctttggtgacatctaactgtctcttctttcttatcttatctgagctgatgaattagagcagatcaaattgcccatcatctgtctacgaacaattggtatatttagataattgaacagcttcctttctcacattaaaatctggtaactgataaaatgagcgaattgtccaaattgacaagactgaaacaacataggaactttctgagtttggttttgttgttttggagagtttttgttttttttttcctccaatttattctgcaacacgttttgctaatctcaagtttcctctgacttgtgtgtatgtatcagaaactttgttttctgccttagaaagccagtagtctctaaagaaaattgtattcattttattaacaaacagaagagacatcagcatcattattatgttaaataatagcaaaatatcactttttaaatgtccggtggctattaacaagtaattaattagcttttgttaggcaaatggtttctggagcttgagaacttttattaaagtttagttaagatttaatatacagtcacagtttgctcctgctcacttagtatccagcatttttttcttcttttttaaaaatcatgacacagagagtataatcttggtagataaaattaacctggttgggggaggttaatacttcggagagggagtgaaaggaagtaagggaagtcggggtacaggaagggggagggattttctaaattgtttggtcaccgccaaagtcaagtcttcaccctatgaaatggaagatctcacattgagtaggcggagggaggaaaaacttttgagtccaccttctaacctctgacaaatgagcgttttcattgtttactagattggtgtgtaaacgcaagattctagagaaggagagcccacttcaggagtatctttactgctatggaaatagtattttgctcaattgcacacaggcttgcatgtgcctaattctggatacacacatgtgtagaaggaactaatcatttttaccttctcttcactctctctcaactctgtgtgtgtgtgtgtgtgtgtgtgtgtgtgtgtgtgtaatcttgtagttgtaaaagcagaacagactggacagttagatttccacatctctccttggagaagcaggatgcctcctcctgttatgtggatcttttcctctctcttccattctttctgttcgtaggaatgccccagcttctgttattcctgaaagatggagaaggggccagggaagtgcagcctagatggaacctataaagattgtcccttggtaaggaaaggccaggagtgagaaagaccttagaagcgggtctttgcatttttttcattctggtcatggttttcaagaaaattgaaatgaggtagatgattcagcaacttgaaaaagattgagggaacagacgcagatttttttaaaaaaataataatacaaggaagaatggagaggaaattttctgttaacattgctgcctgaagaaaatctttagttggagaaagactggaaagtacttgtgcaaaaggagatgtggaaactctcagaggtttcattttgttattctgcttgtttatttgtgagtgtttgcaaaccgagtggggtgacaatccccttctcctacctccttttttcttggaaggaggactttttgttgcagttttagacatttctagcagcagaaattgtgggatagggaagtgaaagtgttggtgtcggtggccaccagagtctttctggattccttcctgccaagatctgcaagatcaacactgggattgattgctagagcagcagcccgagtttggaacccatcaatacattttctgtggtacaagctaggtgttttgagctaagagttaccaactaagacagaggttcatcggaaaggaaacgggagtaaaagaaagggaggagggagggaggggaaaagagagatgggggaaggaagagagacagggaaggagagagcagggtttcatttctgtccttctgtttccaacttctgtttggaaatgctgtttacttggggcgtcttgcccgggatcttgggccagggaagtgccggcctgaagtgaccccctcttcctgtacttctctccccgctctgggccgcctccgctcccccctcccccgcacaggttgtacgggatcaaatgcgccaagtgcagcatcggcttcagcaagaacgacttcgtgatgcgtgcccgctccaaggtgtatcacatcgagtgtttccgctgtgtggcctgcagccgccagctcatccctggggacgaatttgcgcttcgggaggacggtctcttctgccgagcagaccacgatgtggtggagagggccagtctaggcgctggcgacccgctcagtcccctgcatccagcgcggccactgcaaatggcaggtactcctctgcccggctcgggtaggcaggcgccaggttaagccagcctgtgtgccagcggccacaacaactatggtagctacaggggtggtcgtagtgtttgcctgcagttaaatgaagtgttctgtatgcaatttgcgctgtgctctgctcctttgcagcaaggttcaatgcactcactgtctcccttgattccccgagcacacctacaccgtctgtgtgtctctatatggttacacataaatgtacaccacttgtgtacacgtgtatacacacgcccaaacattacttccagttcgctctggcctccaaaccttggcttgctgaaaacgggcttcagctcccagccaggtattctcctgctgcctaattaaaggggcggagccccgggtccctggagcttcatcctttaacccaatgaaggaagcttaggtggcctgaagtcatttagtctcccaaatcctttttccttgtgagttgcttcacactcgaaattttttttttaatttttttatctttctgtgagagaacaggactgaaaagatacagttttaaaaactgcaggccattgcacagagttgtaatataaaactgtcaacaagcttatctgcagtaattgccttttaaagggagcctgcttctttaaatcattcattctatatgatttggtgagaatttcatcttcaggcccatggttgtagctctaaattgaccccataggtgttggcctgaccctagggggttgtagaaggtgcaggatttgtatcatgtagataagaggactcattcccaaggaagaggagtggaaacacagcaaggttggccgggaccaaagcagtgggttagaaggtggacagtgtttccaaacctgacttcctgccatgaatagatctacccctttgcagttttaaagtatcaattcccactaaacactgaaggtgaggaaactatagccctcccttacccttctgccttctggcagctctaagaattctgttcagggggatttgtgactagtttgcaccggggcacggctggggtggtgctcctgttcagtggagcctgcactctgcttgtggggaagcacagaggaagctaaaataccgagagggaggcgggggacatctcccagccaccgtttatctagagcctaggcagctcaacagagtttccgttttccactgcttgggatcagcccatctcaggaacatccatgtattaccttagatttaatactaagagcagggattggagatatggcagaaatagcgaatctcttcagccccttcacatgactgtcctctcggactgaagttcaaggcgttctggcagagttctcgaccttccccttgcagaagtccctgctggtgtagtatttatggctgtcactgaagtgctctgcgttcctttccctggtaccctctgtggccttggcccaagagaaaattctgatcctggagagggtggtaatcaatgtaactggggcccagtctgggcacaaggaaaggtgagaatggaggagaaacagtgctgaaaaatgccacccctgctgtgaacagggggacagactttgagacctgcttcccttggctaacactttgttgacacgaggaggggcgagtgctgcgtttcaggccgggattactcagcaaagacctctgcagattagagaggaagattttattctccctttcaccctcttcgcccccacctctgccgccccctgctttgtgtgctgaggctgcaaaccctagccattgtcctgagtatctcgggcgggcgagcaagtaagcgggcgggcgggcgggcaagcgagcgagcgagcgagcgcgcgaccgcgggcgggccggcaagcgagcctccagcccagcgctcacggcgctccttgccccgcagcggagcccatctccgccaggcagccagccctgcggccccacgtccacaagcagccggagaagaccacccgcgtgcggactgtgctgaacgagaagcagctgcacaccttgcggacctgctacgccgcaaacccgcggccagatgcgctcatgaaggagcaactggtagagatgacgggcctcagtccccgtgtgatccgggtctggtttcaaaacaagcggtgcaaggacaagaagcgaagcatcatgatgaagcaactccagcagcagcagcccaatgacaaaactgtgagtggctctggggccgggcagggaatgcgagggggaaggagacgcagcgtgcgaggtgcgttcctggtacgcaggatcgcacggttttcaatcctgctcctgggcaggagtttggccggggctgcccctcatccttacccccctacccatgccccgggggacaggctacccggcgccggccgccagctgagggcggggaagctgggaggctccgtgcgccgggggagcagcatccaggtcccaacctcgtgggtgggctcatgcccttccacctcgcctgtacctgtgaaccggagaaacgccgtcctcccctctgagggcaggcggcaacgaggtttggcccgggttttgccaacattcagatcgtcagttcctcacgtacacaagaagagggagggataataccttggattcctgcctacatccaggggttccgtgggcaggtcaccctgtgagcccccagggcgcaccgcacttctaagtaaggtcggccgctgcgccttcaggctggcgagttcccccaaggtgacccgcatgcccagatcaccctctgctccaggtgaagcccaggcctccacagaggcatcaggcccctcgcaccagtatccactgttatcttggtcccacggaagcacccactctgcaggcctcctggtgaagttaagctagagtttcttttcttcctttttttcttttctttctttttcttttttttttttttttttttttttttttttttttttttactgctttggacctatttttaaatgccataaaatctgctgtcattaaacttggcaggctggccaagattgggccagggcactttctgagttggttagtgcataatagcacaataggaaccagacccaaatgctttggggggatggagtggggggctggctcttccttgaggagaacggcttggaaaaaatctgcagctaactgaaactgctcagaaaaccaccctgtctagaggctgaagggaagccctgcttacctcagctttttagttctgggaagctatggtctgagaaggcagaggggaggaattgggctgagctgtgaaggtaagggggaagaagaaaatcaaagtagaatttggtttaataaggtccatgcagacctaatagtccagcccacagaggcagaaaaacaaaacaataaaacaaattgaattctaactaatatccgtaggtacggcggattaactgagtcaataaagaccactatatagataagataataccagggtatatttgcttagcctgtgcagacaacggagggagggaatttgctcattaacatgttgggattggttggggggcctattcacagaatatccaggggatgacaggaactcccatggtggctgccagtccagagagacacgacggtggcttacaggctaacccagtggaagtacaaagttaccagccaccttggaaagtactgagcgacttcgccttgcagagtgacatagatcagcctgcttttcagcaactggtaagtgtcagctcccagatggaagaggctgaattcccaacaggagactctggtttaactgtcacacattgaaagattcagtggggagggtgccttcttgggctcagggttggggagaaaccaaggaggtgggtaatgaagagaagggagacaaatgcagggaaaacgaacctcttggcatctttttttttttaatgagactgcataatttgaccatataggttgaattttctatcaatcaggccttctttgaaggattaatttcaaggtacctaactctaggtagcatgtgccagaagatgtacagtgttggagaatcatacatcttagaattttagagttgtcaaggacttcaggaaatcgtcttggcatttcaatcagcaattagtaagtttatccttcctgagcatctagagaatgggatatataggacccaaatcaaggcgattgtagtatataatcaatgctataatacacaatcagtgttgttatcaataaacagcaggcatgtgtctgggtacaattttcaaatatattaataaagattattcaaatagatgaatactttttgttacagtatcccttgctgggaatgtcttaatctaaaatgtaggaccgtttaaatgttttcaagtgtatgagttcaaatgtcatagagacacacagtgtgtaccatgtatagcaaaagggacatgagctctaccaatcagaagtaaagtgtttaatctgtgaaaaccttaacatgttttccacatccagagaggagaaaattaattcactttttgcctacaaaaggcttaaggggtcaagataaataagaacaataaatatatgtcctttgtaatatgctatatttatatagatgatttttttttcttaaagagtaatcagccttatagaatcttgttttataaaatgtaaagatctatcctgaaaccttgttcccttttttggaaatgaagctttagttgaggttagctttttaccctcatatttacctggagggcatttgctttctcaatgtcaacagttaggtaattggccagaggcaagtggttaaaagggcttggccccaggcttgtgtttgcaaatgctaagtgggtgcagaggctagaagtcccttaatctcatattggaaaaatttactgtagaaagaaatgtaggctctagaactaggaaaaaaaaattattctaagctcattaatctgttgagttatttgagcgaatcctgaatcacaggaggaaggtaaggggaggcttcagggcagccaaatgtttgcactttctgaaactttagtgtcagatgagagcagtggaagggaagctgaggcaggagtgggcatagttagagaaggtttacaacagcagtacaatgcgtttagggttaaaagaaggagtcagatatttaagaaggagtcagatattagggttaaaagaaggagtcagaatgggatgatgtcataatatatgggtctcattttggaaggaagagcctgatttaaagagagagagagagaaaggccaagaggcagcaggaccaacaaggaagaatgcccaagctgtgagcctgctgaggagttaatctttgttctgtggagcctcctctcaatctcctgtcaaaggatctgagcctgttacggattttccaactgaagaagagagtctttgatgcctagagactgagagctcacctactcccagggcaacatgtagccagcaggataattttatttcgagcatgcatagtagagttgtgatgccattttacagtgggaaacacatttgttcttaaataatttaatgcaacataatgttgggaattcagtttcagttaaaacagagatcttttggaagatgggaaagtgagaggatttcttcccaagtttttctcctctaggctttctctaagcctgttaaaattcagttatctatgtgaatatctttacatatctatctacacaaacatttctacatatacaatatgatgagtttataatctttttatgaatactattccagtgtcctttatttatttctcaaccttctatgcaggtcaatttttcagaaggaggaccgggctctaattccactggcagtgaagtagcatcaatgtcctctcaacttccagatacacctaacagcatggtagccagtcctattgaggcatgaggaacattcattctgtattttttttccctgttggagaaagtgggaaattataatgtcgaactctgaaacaaaagtatttaacgacccagtcaatgaaaactgaatcaagaaatgaatgctccatgaaatgcacgaagtctgttttaatgacaaggtgatatggtagcaacactgtgaagacaatcatgggattttactagaattaaacaacaaacaaaacgcaaaacccagtatatgctattcaatgatcttagaagtactgaaaaaaaaagacgtttttaaaacgtagaggatttatattcaaggatctcaaagaaagcattttcatttcactgcacatctagagaaaaacaaaaatagaaaattttctagtccatcctaatctgaatggtgctgtttctatattggtcattgccttgccaaacaggagctccagcaaaagcgcaggaagagagactggcctccttggctgaaagagtcctttcaggaaggtggagctgcattggtttgatatgtttaaagttgactttaacaaggggttaattgaaatcctgggtctcttggcctgtcctgtagctggtttattttttactttgccccctccccactttttttgagatccatcctttatcaagaagtctgaagcgactataaaggtttttgaattcagatttaaaaaccaacttataaagcattgcaacaaggttacctctattttgccacaagcgtctcgggattgtgtttgacttgtgtctgtccaagaacttttcccccaaagatgtgtatagttattggttaaaatgactgttttctctctctatggaaataaaaaggaaaaaaaaaaaggaaactttttttgtttgctcttgcattgcaaaaattataaagtaatttattatttattgtcggaagacttgccacttttcatgtcatttgacattttttgtttgctgaagtgaaaaaaaaagataaaggttgtacggtggtctttgaattatatgtctaattctatgtgttttgtctttttcttaaatattatgtgaaatcaaagcgccatatgtagaattatatcttcaggactatttcactaataaacatttggcatagataaataaataaa

SEQ ID NO: 6 - protein, 349 aa, Homo sapiens
MGDMGDPPKKKRLISLCVGCGNQIHDQYILRVSPDLEWHAACLKCAECNQYLDESCTCFVRDGKTYCKRDYIRLYGIKCAKCSIGFSKNDFVMRARSKVYHIECFRCVACSRQLIPGDEFALREDGLFCRADHDVVERASLGAGDPLSPLHPARPLQMAAEPISARQPALRPHVHKQPEKTTRVRTVLNEKQLHTLRTCYAANPRPDALMKEQLVEMTGLSPRVIRVWFQNKRCKDKKRSIMMKQLQQQQPNDKTNIQGMTGTPMVAASPERHDGGLQANPVEVQSYQPPWKVLSDFALQSDIDQPAFQQLVNFSEGGPGSNSTGSEVASMSSQLPDTPNSMVASPIEA

SEQ ID NO: 7 - protein, 285 aa, Homo sapiens
MEPIKIVPWLYGIKCAKCSIGFSKNDFVMRARSKVYHIECFRCVACSRQLIPGDEFALREDGLFCRADHDVVERASLGAGDPLSPLHPARPLQMAAEPISARQPALRPHVHKQPEKTTRVRTVLNEKQLHTLRTCYAANPRPDALMKEQLVEMTGLSPRVIRVWFQNKRCKDKKRSIMMKQLQQQQPNDKTNIQGMTGTPMVAASPERHDGGLQANPVEVQSYQPPWKVLSDFALQSDIDQPAFQQLVNFSEGGPGSNSTGSEVASMSSQLPDTPNSMVASPIEA

SEQ ID NO: 8 - DNA, 16043 bp, Homo sapiens
  source 1..16043: mol_type = genomic DNA
  CDS join(265..513,1891..2296,2626..3333,4062..4114): protein_id = 9; translation = MSYPQGYLYQAPGSLALYSCPAYGASALAAPRSEELARSASGSAFS PYPGSAAFTAQAATGFGSPLQYSADAAAAAAGFPSYMGAPYDAHTTGMTGAISYHPYGS AAYPYQLNDPAYRKNATRDATATLKAWLNEHRKNPYPTKGEKIMLAIITKMTLTQVSTW FANARRRLKKENKMTWAPRNKSEDEDEDEGDATRSKDESPDKAQEGTETSAEDEGISLH VDSLTDHSCSAESDGEKLPCRAGDPLCESGSECKDKYDDLEDDEDDDEEGERGLAPPKP VTSSPLTGLEAPLLSPPPEAAPRGGRKTPQGSRTSPGAPPPASKPKLWSLAEIATSDLK QPSLGPGCGPPGLPAAAAPASTGAPPGGSPYPASPLLGRPLYYTSPFYGNYTNYGNLNA ALQGQGLLRYNSAAAAPGEALHTAPKAASDAGKAGAHPLESHYRSPGGGYEPKKDASEG CTVVGGGVQPYL
  CDS join(265..513,1891..2296,2626..3333,4062..4114): protein_id = 10; translation = MSYPQGYLYQAPGSLALYSCPAYGASALAAPRSEELARSASGSAFS PYPGSAAFTAQAATGFGSPLQYSADAAAAAAGFPSYMGAPYDAHTTGMTGAISYHPYGS AAYPYQLNDPAYRKNATRDATATLKAWLNEHRKNPYPTKGEKIMLAIITKMTLTQVSTW FANARRRLKKENKMTWAPRNKSEDEDEDEGDATRSKDESPDKAQEGTETSAEDEGISLH VDSLTDHSCSAESDGEKLPCRAGDPLCESGSECKDKYDDLEDDEDDDEEGERGLAPPKP VTSSPLTGLEAPLLSPPPEAAPRGGRKTPQGSRTSPGAPPPASKPKLWSLAEIATSDLK QPSLGPGCGPPGLPAAAAPASTGAPPGGSPYPASPLLGRPLYYTSPFYGNYTNYGNLNA ALQGQGLLRYNSAAAAPGEALHTAPKAASDAGKAGAHPLESHYRSPGGGYEPKKDASEG CTVVGGGVQPYL
  CDS join(265..513,1891..2296,2626..3333,4062..4114): protein_id = 11; translation = MSYPQGYLYQAPGSLALYSCPAYGASALAAPRSEELARSASGSAFS PYPGSAAFTAQAATGFGSPLQYSADAAAAAAGFPSYMGAPYDAHTTGMTGAISYHPYGS AAYPYQLNDPAYRKNATRDATATLKAWLNEHRKNPYPTKGEKIMLAIITKMTLTQVSTW FANARRRLKKENKMTWAPRNKSEDEDEDEGDATRSKDESPDKAQEGTETSAEDEGISLH VDSLTDHSCSAESDGEKLPCRAGDPLCESGSECKDKYDDLEDDEDDDEEGERGLAPPKP VTSSPLTGLEAPLLSPPPEAAPRGGRKTPQGSRTSPGAPPPASKPKLWSLAEIATSDLK QPSLGPGCGPPGLPAAAAPASTGAPPGGSPYPASPLLGRPLYYTSPFYGNYTNYGNLNA ALQGQGLLRYNSAAAAPGEALHTAPKAASDAGKAGAHPLESHYRSPGGGYEPKKDASEG CTVVGGGVQPYL
  CDS join(1921..2296,2626..3333,4062..4114): protein_id = 12; translation = MTGAISYHPYGSAAYPYQLNDPAYRKNATRDATATLKAWLNEHRKN PYPTKGEKIMLAIITKMTLTQVSTWFANARRRLKKENKMTWAPRNKSEDEDEDEGDATR SKDESPDKAQEGTETSAEDEGISLHVDSLTDHSCSAESDGEKLPCRAGDPLCESGSECK DKYDDLEDDEDDDEEGERGLAPPKPVTSSPLTGLEAPLLSPPPEAAPRGGRKTPQGSRT SPGAPPPASKPKLWSLAEIATSDLKQPSLGPGCGPPGLPAAAAPASTGAPPGGSPYPAS PLLGRPLYYTSPFYGNYTNYGNLNAALQGQGLLRYNSAAAAPGEALHTAPKAASDAGKA GAHPLESHYRSPGGGYEPKKDASEGCTVVGGGVQPYL
actcccgactccagactcccccaaaccccgaccgccggcctggcgcgcggctgcgcccaccggctccgcgctgctgccgccgccaccgccaccccgccgccgccccggcccgcgggccgcccaggctagtacccgggccggcctgcctccgccggccgtccgggtgcccgccgccgcgccgcgccccggccgggcgtggatggagggcgccgcgcgccctgcccgctgctcggcgtgacgcgggccccgcgccccgcgcccaccatgtcctacccgcagggctacctgtaccaggcgcccggctcgctggcgctctactcgtgcccggcctacggcgcgtcggctttggcggctccgcgcagcgaggagctggcgcgctcggcgtcgggctcggcgttcagcccctacccgggctcggcggccttcacggcgcaggcggccaccggcttcgggagcccgctgcagtactcggccgacgccgccgccgccgccgccggcttcccgtcctacatggtaaccgggcgcgggcgggacgcgggactcctgggcgccgggacccagacggggctcaggcggagcggggctcgggttcggcgggcgggggccgccgggaatgtggcgcggctggcgactcaggagtcgccggctcggttggccgccccgcaggctgagccgggccccgggtggggagggcagcgcggcaggcggggacgtccctgagcccggccgggacccgcgcgccccccgcgcgtcccctcggctcgccggctgattttctctgagagcctgggaagtgcgtctccgccggggccggggtctggcgccgtttgtccctggtttccgcaccgcagcctggggaggcgttcggagcgggctgtgtgctcgcctgcattggcgtggggcgcgagggtccgcgtcactgcggcctctgagccgacggccgggcggttcgcattcactcgcggggctcagggcggtgggggtcaccgagttaggcccaggagccgagcattcagctgcggctccggagtccggcccgaggcgcccaggtttcggccttactctgtccagcggaccatgctttcaaatatcgtgcttgcgggcgcgtgacccgctaagggccgcctgagtcctccgtggcccgagcgcagctcctgctccggcgacctgggggcggctcgcgagtctcgaggttactgagctgggccaggcccgggccgcggcgaagcacgttacgggcgattgaggccattacggggttgtcgcgactgccggccctcggcggaatttctgggcagcgaccgagtcgctggggccttggcgaaggctgcaaatgcctcgaatttaaacgttaaaggatgaattaaaatgctaattacggcgtatttgaagaattcgaaacggtgactggcttctgagttgcaaattggatttgcccagctttagagcagtgaatagtgaattgggggctctggggtgtttttttaaccatataagggaggggaagagggagtagggggaggcagccgcactccaagcatctgcagaaatttagatatcaaagagctacctgtgggcctgtgtgcgcgcacgtgcaagggtttgtgtacattgccacgagcggctccggaacacttaggggaagatgggtcattttaggaaagtgaaatagttcagaaattcgagaataaaactccggtactttttgtgatcaacagctggtcccgaatcacactgcgtttttcctgctcttttgcggcgggaagcgcagccccagagccagactcacggggggaacggtggccgtgggcgggcggaggggtggcatcctctggctggttgcccgcggggtctccgcatactccactcacaggctcttgttggttccagggcgcaccctacgacgcgcacaccaccggcatgaccggcgccatcagctaccacccgtacggcagcgcggcctacccgtaccagctcaacgaccccgcgtaccgcaagaacgccacgcgggacgccacggccactctcaaggcctggctcaacgagcaccgcaagaacccctaccccaccaagggcgagaagatcatgctagccatcatcaccaagatgaccctcacccaggtctccacctggttcgccaacgcgcgccggcgcctcaagaaggagaacaagatgacctgggccccgagaaacaaaagcgaagatgaggacgaggacgagggcgacgctaccagaagcaaggacgagagtcccgacaaggcgcaggagggcacggagacctcggcagaggacgaaggtgagcgggcagcggccggcgcaaggtctcggggcgctttcttcccaggcggggcgcagagctaaggcggggaggacgttgcccgccggacaccccaggtccgggccggagccccagccgcaccacattgccctggggtcgccgggatttgagcgagcgattcctcgggcccttcccggggaggtcaggctccgcctgtcacgtggccgggtgggggcgaggtgaggggtcccgtggggagggcccagtgccgcaggacagggggcggagggggctccaggtgcctgcgctgtcccctcgtgccacccaccgtgcccgcgcccccacagggatcagcctgcacgtggactcgctcacggatcactcgtgctcggccgagtcggacggggagaagcttccgtgccgcgccggggaccccctgtgcgaatcgggctcggagtgcaaggacaagtatgacgacctggaggacgacgaggacgacgacgaggagggcgagcggggcctggcgccgcccaagcccgtgacctcgtcgccgcttaccggcttggaggcgccgctgctgagccccccgcccgaggccgcgccccgcggtggccgcaagacgccccagggcagccggacgtctccgggcgcgccgccccccgccagcaagcccaagctgtggtcgctggccgagatcgccacgtcggacctcaagcagccgagcctgggcccgggctgcgggccaccggggctgcccgcggccgccgcgccggcctcaaccggggcaccgccaggaggctcgccctaccctgcctcgccgctgctgggccgccccctctactacacgtcgcccttctacggcaactacacaaactacgggaacttgaacgcggcgctgcagggccagggtctcctgcggtacaactctgcggccgcggcccccggcgaggccctgcacaccgcgccaaaggcggccagcgacgcgggcaaggcgggcgcgcacccgctcgagtcccactaccggtccccgggcggcggctacgagcccaagaaaggtaggcggcccgcggccggcggcgcccgggaggggagggagagccagccccggggaggcggagcgcccgggagacccgagggagggtccgggaagaagatccagggggccactcctgggacccagaattagcagagtgagggcggagggcgagatggaagccaaagaaggtgtggccctctttttagacttgccctgttattatttatttttacttaatttactgttattttgactattactatcgtggctgtcttagtttcggcaaacccagattgccacgaaattcaaattacagcgtgtcgccctaatgagcctgggtgtgtttcggtgtcttgttaaggagtcagagttgaatccgcttttctgccgttggctagaggcaaacagaacgttccagttactctcagaggcgttttgtcttcaaaagataaaatcaaatgttttttccgctttttgttgttgtcgttgttcggaaagaaaaccgttttttcccctgtgctatgttgcctgtgttgctcctaagtcaggctacccgaaagaggagttcaaggggggaagttaagaactagggaccatcaccaaaagtcgtctcagatagcggccctggagacagtcggtttcccaaactgctgtttgcctgggagtggaggatggtgggtgcacggtggtctgcgcagccagcaggctgtggggtcggttctgactaactgcccactcccctgacagatgccagcgagggctgcaccgtggttggcgggggcgtccagccctacctatagaagggccgagcacagcaatgcaagtaagtgggcaccctggtgcttcccagaccctgtggagcctcccagcaccaacttgcttaatgtgtttttcttgcttctggtcatggggttagaagacagagcatttcaatcttgtccagcttttctttccttaagggggaaactatattttctgttttatagattccctctttttggcacaagttctatcactcctttacctagggaaggaaaaaaaaaatatatatatatatgtgtgtgtgtgtgtgtgtaatatatatatgtatatatatagtacatgtatatatatagtacatgtgtatatatatattacacactactgttgttttcttttgaaacaatagattattaaaatctgggcatttatatgcaatttagagccatttttactatgctagacacataatagacacatgctttgatgagcttgggctaccaaaacttggagtagcaaaaacctttatagatgatgtttgcaaaataagactgaagagacacgaggcgtactagtcttttatcagccctgtccaacctcccctccacccatgtccaagtggacaggactctgacattctcccggggctcacaacagtatctcaaaaaatatgttgctttgcaacgagtcagaattactaatcatagatcttgaagataagaaagatttggaaccacttcagatcaactcgtttttataatggtgttgttgtggaactgaaagattggggatgatttggttttttccttggtccacaggtaggtgtcacaattgctttgaaaaaaaaaaaaaaaaaaaagtcagcaggccattctctcttcccaagctcataaatttacagatacaacaaacagatgtctaaatccagaccacatcttgtgccactgtaaaagagaaggatccacacagcactgtcagcccacagactctaacaattggaacagactattgttggacatatgtgaatttgttggcatagtatagtttccccgatgtatgtgtgacttttgaaaacaatctgtttttctcaggatatcttgaattgatcacttcattgccacggtatatattctataggtgtgataggatttactgtaaagtttatttgtaaaagatgtacacagtagaaataaaacgtgatggaagaacttgagtacttcagaagtggaaacaaatttgatatttatttttataatgatataaagcttctagtaatttatgcaagttgtattgcaatggaatctaaactttttgtaaataaattctgcctggtttttatttgaacattgctggttatacaatctttgttggttgtttaacacgaattctttactaatttatatcttaaattgtaaataaaaacagactagtctacaataatatgatgtttggggcttatttttcctagaagaatgatttggggtagagcgctagtgaataacctccaggtgatctgacctcacctttttaatgaaaacctgtgtgaaataaactctcctttctctcctgagcattgaaaaaaaaaaaaaaaggcagatggaagagaagtatataatcgggagaaacatgtgctgtagatgatttctatacaggtattgcaaaaaaaccaaaaaacataagatttttgtgccctgagtgtgctaattacttgttagtgtaaatttttaaaacttggcaaaataaaatgatctgacaccctatgcattttatatttatttctgatgctggcttcttgaacctcctcagtaaaccaaactggagaataatattgataatggagagccacacccccccaccaataaattactgatggaaataattgttttttttaaaggctgaattatccaaattggcctaattattcaaatttatggaaggatttcttaactgtccttttcctataatgcacattaaacctcgggtgaggatctgggggagggacttactttcctttcagtggctcttactcttaccctgggggaaaagaaacctttaaacaaccttagactactgcctctttattgtgttactcactttctaattataggacaagtctaaaatttgtagtcaagtaacatatcccctttgattagtatcataaaagtagcaagcctgtcactttaattttcagcaaaattatatggatatccatataatataatttcagagaagaaatgaacaatcatttatttcctctcgaaagataaattgagtgaatataacttacggttataaaacaagaataatagcttcttagattgccctttaatcaatcatacacttatttttcaagaggttcatctattttattccatgattaataatgttgcagcatgagagcattattggatcccagcgggggaggtctgggatgcttttagctgctttggaatggtcagttggggttcattatgggctgatattgaacaatttataaaatcttgtctaaacatctgccagctccgataggccaatgtgtctgaggatgggaaattgctggaccagttgatattgacaaacggatctctctctagtggctttttttgccatagaaattagtggcctcttgctggggtcttgttagaaagggtatttgaaagtaatcttagatacttgaggccaagccaggggactgttaactggacacagagccataccgatggggagaagtgattgtggtttgactgtggagaaggggggcagaaccaggtttctgttttctgttatttcttatgtattttgttagttttaaatattgaagcatttggaggtcagacataaagtaaatctctgtggtggagaactgtttttctgtcttctctgcctctcctagtaatagatatgagcgtgtgtggagctgagctatctattggcaggaggaaagatttttcacatggtaagctttgccactctggcagtgtatctggaaacaaacacatctgaggtctggagggtaaaagggggattgagtatatttgcttgttttggttttagaaataaaaccttcatagacttttcatagagataatgattttccccttcaggaagcgttttagattgttgtctgaaggtcttacgtagcttacttttattaatattacccatatttcctaaatcagcaggaaataaattgcacatggcagcaatgtctctgctatgtgtaatgttataactagagtaattggaagacttctgtgaaaagtatgaaagttaacaatatttaacaaaataaacacggaaagatcatgcactctaatgaagatacaacatttaaggcagtacatttcttaagtgtgagagtagaaaagctaagccaaaattaacctttgcgcttatgttcaggcattggagcaggggtaaaagccgcctccctttggaatgaggaagattgttttacctgaacatgcgatccctgttccctttcaacacacacacacacacacacacacacacacacacacacacacacacgactccattctctgggaggacatgcatatttcaattggtgaaaactcaaagcagctcaggagattagccaaggctaaggaagcttctttgatgtttatatgcccaacaaattattaaagatttccataacttacccactctgtctcctgacctgaatttccttctagagaacttgatttctaaaatatacactaagaacctaaaacctgcaggtgtttagaaggatctttttaaagaaatgtagagtgatttatgagctcctctccatgctggtcattggaaaagatgaacgaggaaggaaggagagagaaagagagagatatctttcactggagagggaagttaatggggtctgaattttatttttgctttaaaattttcatagtcaaaaattacctagccctccaagatagaagtttgctgttgttgactgaggccggggagacgtcggcaaaacggggcgaccaggagcagatgggctttggggcggtggccttggctttgctgcgggtgcaggcctgggcgcgctcccggctccgcggcccggcgcccgcgtggtggatccgcgacagcccttctgctctccgcggcccagggtttccttagagctgatttatcggaattcgcgctttaatctcaggtgggccccgggggccgggggctgccgagagcaccggggcgcttgcccggcggccggcgcgggcgctgcctcccgcgcccgtcaaatgtcaacatttgttcccaataaaagagttattgtttctgcaaagctgcccagcaactgcctttgaaacttgaaaagaacttcatccacctttgtctgatgcgaggaaggaggggcggggagcggagagaggaagggggctgggtgctggggcctagaggggcagccttgggcctgggctcagggtagccagcctggggtgcgcctccccagaaccccctcgccgggccgccgcggatctcattctggagttgggagagtggtgggagagggctcggggttcccctgaggctctctttaacttatgtgtttattagatctctgcggattctgggaggcgagaaccactgcgaagaaacacaaagatgaaatagccacctccgaagcccgtgcgcgttttcggatcatttacaattgcatttaagtacatatcaaggaggctaaaagtaaagtggaccctttgttttttaactacggagtgaatgtacatactaaactaccactgttacagcctaattaaacagacatcaatttggaaaaaaaaattgttccaaacaaatttgtggtccactcagaggcattttcaaatttcaataacactctgaagtgaattatgagaaagtttcatccaagtaacaatatacaataattatcactatataatttttctttagttgcccagtaccttgagaatcccaaggaaaacattcatttagactcaaaattaaaatataaatagatataataaatatgttttaaactgcttttacaaacataacattttaactatttttttgaaagcgttaaccgaagaggctatcttgggaacaatacacaaccgtctgtgctatgtggatattatgattaacatcatttgaatttctacaaatcgcaagggggacatgtccctttgatgtattttcaaacctttatgcaagtgacaaatccctacagatattttaaaggctaattataaggagaagtaatctatgacaatataattttccagttgctgaaaattactatctattggccataatgaaagcactcactagccctcccctttgcttgggctagaatgctacgaatctggttttcaacaatatgcacttggacctcagccattgatgggtggaagagaaaacactttgagccccagttttaggaagcagacaccccacttgtatgcatcagcctctcccttcagctgcatccctagaaacagatggatgtggcctcaaccggcacctctgtcccctccacccttggaacagagaatagtcttgtgtttcctaccgtgaaggcagagtgttctctctctttctaagaaagataataattgaagacacaatttaagaggactgtattgctaatacaatgaagaaaggaaatatctgttgtccgtatttgcgcaatcccagataaaaggaaagaggaagaattttttttgtttgtttaactctggccccatgataataaaagtatttttaaaaggtgttctaatgttactttgttctatatggagctgtaaataaatgaaatgtaatattcttaaagaattgactatgaggtttggggctgcctccaatacggactcgatattcacagaaaatacccagagggaagaaacaaaacacaatgctacacaagcactcgcatttttgtggggagataaattgacaatttattgtgtgtgactcctgatcaattattaatcgttagtgtcaacagcacggttataattaccttgggttattttagggaatttttttttcatttatctgatctggtaattagttaatgctcttgagtaataaattcaaagaagagctcataagagtcaagactcacccctacacctctcctcctttttggtgacctttaaggaaaaatacattcacccagtcgttctcagaaattccctccttgcctccattctaacagtgggcttttttttttcctgctataaataatgattccagaggaaaaggggaaaatgacaaacaaatagagcacagctggaattaataaggctgatcaaagttagtgggactgagactgctggcagcagccacaggtctgaggcccataaaggtgccaggagttcttgcctcttccctctaagatcaagaaaaagggcaaatcgaacggtttaacccttgacaccttcttactggggaaaggtgggcttcggggagaacttttgtttttagtccttactaatagcggcgttgcggtccggctcggcctgaggccgggaagggcgctgcgtgttcgcccagagcgagtgcgggtcccgcgtgcacccggctctgcacccagcaaggtggggcaggacgcgggtcctcttggaccctgaaaggttaggaggtgagtgaccagattaggtggggtcaaggcagcatcctggggagtcggggggctgccggccgggtgctcagtaagctcggagggggcgaggaggtctcagctccaagacaggctcctcagtgcgtgcaagggggacggtgcactgtcgccgctgtcgccttcccagtgctggagaccctgggccgaaggtgcgggagctggaggcgctggcccggctgcctgcctggtgccctgcccgcgttcttcccggggttccgggccaccttccacccggcccacgtccttccccgcaggcgcgtgctccctggggagtcttgaggggcagaagctggctcaagcccttaaacgcccacccagggttggttccaggcctacgtgttttgcctgagcagctgcaatcatttcttcagggaactgggttgctcccggctctccagccccgggactgtccgatttgggaagggctccttcacctctaggcccatttctgccctgcagtctccccaagcgcggcgctgccgctgagtgtctgcttagttggtcacaccgagaccctaaaaggcaacgaccaaggccagtcgggagaaccgaacagtcgcaggtcagggaacagtcgcaggagagggggtgagccggctcctgacctcagccccggtgtgaccgctcgccttctgcggccccaaggtggtggctgggagccctgggccgaggcgcacctggaaaaggaggcagcgacggccagggaggccgcagaccgagaccctgaagtcagcctgatgggcaggacccccgcccccgcacgccacgactgccccggcggccccagacccggccgcctgttcatgagttttcgacgccgcttttgcgacccggtgccctggaggggaaacccagtcgggccctccgaagcctccttataggggaatgcagccaggcttctggggatgggtagccaccaaccgacccagaagaacccgcgaggacccccgagctcccactggaggccccgctcctggcacccccagctctggtcccgggcttcagtccccttcctggtcctaccctataccccgcgcctgaagccgcagcgggacccatcgggttcctcccgccctgaccccggcctcccccgacctcttgcctcccagtccccctgctcccgtggtggtcgggactcctccgtggctggccccgggtgctcgcctcgctccctggccctcagcctcaggcccgcagctctggactctgggaaccgcgcgcgcagggtgaacaaagcagcgccgcagagcgccgggaaaccgaaagcgcccggcccgggttcaggacgatcgcggggtccggcggcgacggcggcgggggttcagggcccccgggaccaggggaggtgccgagcgcccgggttcctgccacagccagccttcctctcctccccggtccccccggtctctcctgtttcgggtcctgcctgcacaccgtatttctgctgcgctcggcggcagagctcgaaagccccaggccggcctgcccagcgcttttccaccgctctggcggcagcgttcggtcggcgcgagccgtgtagccccgatctgcggccccagcgcccaggcgggcagtggacaccgacgggaccccaggccgtacccccggcaccgccgcccccaggacccgcactgagaacgacgtacgcggctgccttgcaggcgacacctcgggggacgccccttgggcgcacggagcgagggccggcgggctcggggtgggttgccgcggtgtctgcaccgctccccgcgggcccctggtctgggaagtttgttctcttcttcagggagcttatgcgacaagccggatttcacaggccctacaaagcgcgttgagtcccctcgaagctctcggcgccaccagaacccgctggagggctgcctggaggtggtgatggatccaaggggacacagcggagtcagcggccgggatggaggcgacggagagcacgtctggtcgcctgagtcccatcccacagtaggcctacccggcagcctggggagtcagaagagggtctccagccacagccattacctcgctccttcctctccccggcctcggcgtccaggcccattggcttcaccctccgcgacctctggcggccctgactggggctctgggagcgggtagttcaggtggagggtctctggagccacacacctggcctcccgcaggtggggagacggtcccggaggcacaggaggagggaggcccaagcgtgcggctgggggtggtgagggtcagatggggaggggtgggtgctttgtaacctttggggtcctgggccctgtgatgagccccatcctttctgccattggactcggggtcactgtacagccctggtggagagagggtgaaggcttccctgggaacagcccactgagccccagaggccaggggaccaaagaggcggccgggaggacaactcggcccaagcggggaacaggggggcgaatcaggctccttggtacccaggatgacgttagtttatttaaataggaggccatggcccgtccaggtttattctccctggctctcaagcaatggaaaaacaatttgttttataatgctaatgtaatactcaactcctcaaataaaagtgcccttcatgataatgggcccagatataaacagaagcggctgagagggcccaacctgcttcttccaggcaggcctgtgaccgggagggggctgagtccaagcccagaggagagagacagtttgtttaaaatttctatggagctggactgttttataaaggaaggggctgagttaaggcatgctttgaaagaagacaaacagactttgcaggagctagaccctcaaatgagttatattttaaacaatttactgactttatgatctttaagcagaagcaaataacacattcaggtgcacagccgatgcaccccaactttccagtgcaaacaaggccgggaggagtgggaggagacctgtcagcaggcaggacaggtgggctgtgggctgcagggggtgggcagggggacacccccaggccaggggttcccttaacctggctgttactttgacgtcaggaaaagcccctggtgaaaaacttctctggtgggtgaagatcagtgatggcccgaaatcatctcggtgttctgaagcctaggaaagctgttggcctggcaccggggccacttcctacaagaactggcagcctcaggcggaatgtttgagggcaggtaatgactactacgggtagacatgagatggagtacgatgggtgaacacccaggcatggtccacagccctgtctttggacagttgccctacaggacaggcaggagatggggctggggaagtgggtgctcaccatcgactcctgtgatcttggtggagaggacagcactcgagacctgctagtggggctcatctgagtgggccaaatgactgcccctgaaagcccatctcttccatgtgccaccgggccccacgtagcaggctctgcagagggcttcttgttagttagatgaagccaaggaaggccagcgggcacagaaacatgtccagggtctgcctgtctccgccctctgtcctcgccagtcctgtcacttctctgaacctctgaacactgagctctttcctttctcagctgacctgaacagactgatccgtctgcctggaagattcttctaactcagctggagaatggctgctcaataatgcaggtatttttctgtatttacttgtcacttgctacccacgtggatgttaaagtgaccaggagccacacctgaggcctctcgtgaatgaacggagctacttctgtgtcaggttttggggttccacaggcatgagcaggccatgggtcaggctggttctggcatggctgtggtcggcccacttccacagaccaccaccgcatgctgtccatctatccaccggagatggccgcagtggggaccaggacaagaggacaaatgaggccctgtgtgtctgaacactgaccacttgtaaatcagctgctagatacaatgtgcttatacacaacatgcttatcctcctgccttggaaaatacgttttcaaatgagagaaatcacaaaatatgtgcaaagcatgatttgcatggaagtcatcaacatatcaaaagaggaccagatttaatgattcttatgtacgtctggcattctattctgagggggtagcaatgttaggatttgcaaaaaaatacagacagaataattcataaagtacatatttatcctatgaaatattttgcctttaaaaaaatagaatcactccatatcctgtagcaatcaagattttcacataatttgtgttttgacaatagtggttcaaaaattaaaaagtgatccttctcaaagcatacatttaaatatatcttcatcaaaaattgatagcaaatcaaatgtaagaaataaaaataactaaattatttgtgattttccaaaaaaatttttcttctagcatattcaaagctttctattaaaatttaaagacacaatgcacactataacttatccataaaaagttttcattaaaaagtttcattatgaagctgaattgttttaattctaaaaatttaatccctgagatgaaagaggtctcagaaatcgcatcagaaggggccagggtagtgggaagggcatacatttgggagatcccaggtgtgaactcagggctggagtgcttcaccagggcccagtggagggcaaggctgcaggcatccctgctgaacctcatcctcccacctgcacacatcacctacccgagggctgttgggaagagtaaatgccaaggtgtgacacaggggcttgggggaagactgggatgttggtttcaactgcactagatgttaggaacccatggcgtgggctgatagggtaagaaggtcagttcagatgggaggaggccaaggagcatggcaagacctcagagctgccccacagggaaaagggccacgtggagaagggcacagagtggaatttttttcttccttgaggttaatagttccaatttctacttcattttaacctcggtgcagcacaactagactcagaggtagcttttgctacagtctgggcttctgagttctgagttcaaatctcagacaatttaccaagctccactagttgctggtgagcatcttatcagcagttcaccaggatcatggggcctggcattcagctcaattctcagtttccttctaacttcacacccaggatgccagactctgcttacatcatatagaaaataaaacatattagcatgtgtttatacatgttgtatgtttgattttttaaaaaatattttgtta

SEQ ID NO: 9 - protein, 471 aa, Homo sapiens
MSYPQGYLYQAPGSLALYSCPAYGASALAAPRSEELARSASGSAFSPYPGSAAFTAQAATGFGSPLQYSADAAAAAAGFPSYMGAPYDAHTTGMTGAISYHPYGSAAYPYQLNDPAYRKNATRDATATLKAWLNEHRKNPYPTKGEKIMLAIITKMTLTQVSTWFANARRRLKKENKMTWAPRNKSEDEDEDEGDATRSKDESPDKAQEGTETSAEDEGISLHVDSLTDHSCSAESDGEKLPCRAGDPLCESGSECKDKYDDLEDDEDDDEEGERGLAPPKPVTSSPLTGLEAPLLSPPPEAAPRGGRKTPQGSRTSPGAPPPASKPKLWSLAEIATSDLKQPSLGPGCGPPGLPAAAAPASTGAPPGGSPYPASPLLGRPLYYTSPFYGNYTNYGNLNAALQGQGLLRYNSAAAAPGEALHTAPKAASDAGKAGAHPLESHYRSPGGGYEPKKDASEGCTVVGGGVQPYL

SEQ ID NO: 10 - protein, 471 aa, Homo sapiens; identical to SEQ ID NO: 9

SEQ ID NO: 11 - protein, 471 aa, Homo sapiens; identical to SEQ ID NO: 9

SEQ ID NO: 12 - protein, 378 aa, Homo sapiens
MTGAISYHPYGSAAYPYQLNDPAYRKNATRDATATLKAWLNEHRKNPYPTKGEKIMLAIITKMTLTQVSTWFANARRRLKKENKMTWAPRNKSEDEDEDEGDATRSKDESPDKAQEGTETSAEDEGISLHVDSLTDHSCSAESDGEKLPCRAGDPLCESGSECKDKYDDLEDDEDDDEEGERGLAPPKPVTSSPLTGLEAPLLSPPPEAAPRGGRKTPQGSRTSPGAPPPASKPKLWSLAEIATSDLKQPSLGPGCGPPGLPAAAAPASTGAPPGGSPYPASPLLGRPLYYTSPFYGNYTNYGNLNAALQGQGLLRYNSAAAAPGEALHTAPKAASDAGKAGAHPLESHYRSPGGGYEPKKDASEGCTVVGGGVQPYL

SEQ ID NO: 13 - DNA, 3621 bp, Homo sapiens
  source 1..3621: mol_type = genomic DNA
  CDS join(335..583,1634..2039,2213..3009): protein_id = 14; translation = MSYPQGYLYQPSASLALYSCPAYSTSVISGPRTDELGRSSSGSAFS PYAGSTAFTAPSPGYNSHLQYGADPAAAAAAAFSSYVGSPYDHTPGMAGSLGYHPYAAP LGSYPYGDPAYRKNATRDATATLKAWLNEHRKNPYPTKGEKIMLAIITKMTLTQVSTWF ANARRRLKKENKMTWTPRNRSEDEEEEENIDLEKNDEDEPQKPEDKGDPEGPEAGGAEQ KAASGCERLQGPPTPAGKETEGSLSDSDFKEPPSEGRLDALQGPPRTGGPSPAGPAAAR LAEDPAPHYPAGAPAPGPHPAAGEVPPGPGGPSVIHSPPPPPPPAVLAKPKLWSLAEIA TSSDKVKDGGGGNEGSPCPPCPGPIAGQALGGSRASPAPAPSRSPSAQCPFPGGTVLSR PLYYTAPFYPGYTNYGSFGHLHGHPGPGPGPTTGPGSHFNGLNQTVLNRADALAKDPKM LRSQSQLDLCKDSPYELKKGMSDI
  CDS join(335..583,1634..2039,2216..3009): protein_id = 15; translation = MSYPQGYLYQPSASLALYSCPAYSTSVISGPRTDELGRSSSGSAFS PYAGSTAFTAPSPGYNSHLQYGADPAAAAAAAFSSYVGSPYDHTPGMAGSLGYHPYAAP LGSYPYGDPAYRKNATRDATATLKAWLNEHRKNPYPTKGEKIMLAIITKMTLTQVSTWF ANARRRLKKENKMTWTPRNRSEDEEEEENIDLEKNDEDEPQKPEDKGDPEGPEAGAEQK AASGCERLQGPPTPAGKETEGSLSDSDFKEPPSEGRLDALQGPPRTGGPSPAGPAAARL AEDPAPHYPAGAPAPGPHPAAGEVPPGPGGPSVIHSPPPPPPPAVLAKPKLWSLAEIAT SSDKVKDGGGGNEGSPCPPCPGPIAGQALGGSRASPAPAPSRSPSAQCPFPGGTVLSRP LYYTAPFYPGYTNYGSFGHLHGHPGPGPGPTTGPGSHFNGLNQTVLNRADALAKDPKML RSQSQLDLCKDSPYELKKGMSDI
  CDS join(1307..1345,1634..2039,2213..3009): protein_id = 16; translation = MEGRAAVARSAHGGSPYDHTPGMAGSLGYHPYAAPLGSYPYGDPAY RKNATRDATATLKAWLNEHRKNPYPTKGEKIMLAIITKMTLTQVSTWFANARRRLKKEN KMTWTPRNRSEDEEEEENIDLEKNDEDEPQKPEDKGDPEGPEAGGAEQKAASGCERLQG PPTPAGKETEGSLSDSDFKEPPSEGRLDALQGPPRTGGPSPAGPAAARLAEDPAPHYPA GAPAPGPHPAAGEVPPGPGGPSVIHSPPPPPPPAVLAKPKLWSLAEIATSSDKVKDGGG GNEGSPCPPCPGPIAGQALGGSRASPAPAPSRSPSAQCPFPGGTVLSRPLYYTAPFYPG YTNYGSFGHLHGHPGPGPGPTTGPGSHFNGLNQTVLNRADALAKDPKMLRSQSQLDLCK DSPYELKKGMSDI
agcatcttggcaggacctttgcaaaggcaaaagcagagccccccggtgcaaagagcgaggggaaaaaagagaaagcagcaagggaggggaggggaggggaaaaaaagcccagctggggcgagcgaggcgcgcagaggagcgggcgcggcggtcgcagccggaggcgcgcgggaagccagcgaggaggcgccgcgggccggagccccggagccggggccagaggagcggcggcccagggcagccagaggccaggtgcccgcccgctcgccctcgcagggcgccgcccggctcgttggcggccgcggcgcggcgcgccccatgcccgtgtgtggccatgtcctatccgcagggctacttgtaccagccgtccgcctcgctggcgctctactcgtgcccggcgtacagcaccagcgtcatttcggggccccgcacggatgagctcggccgctcttcttcgggctccgcgttctcgccctacgctggctcgactgccttcacggcgccctcgccgggctacaactcgcacctccagtacggcgccgaccccgcggccgccgccgccgccgccttctcctcgtacgtggtaagtgagcgggatccgcggcgggcgaggggcagcaggggccgggcgggaggacgggggcggagggggacacgggcctaggcgccaacaccgacctcccccgccaagcttcgcggccccttcaaacttgggcgattgtctccgccagcttcgcccaggccttggactcaagagttgctcgcaaaagagagccgcgtcttgctcggatcgctgagctggcgggaaggggttctgtggggagaggtagctgcaattaaagagcagcatttggtgtaaacgtaagctccgggctgccctgcaaattttatatttttggttttgccattttggaaaagtagttcaaaagaaatagactcgaaatttgagcagaagcgtgctaagtctatgtaaatgtgtttggcctagcctttaattagtcctccaaaatgttgcaaatccgtaatcctatcttcgcaatccgatttgggagtattaaatttctgaaaagtcggtcgagctgcggtgcatccgggatttttcggccgggttgtaacttcggtctggggtagtatttttggagggtgggagtgcgtgggcatggctcagctttttgtttgcatttcttagctgttgaaaaaagaaaaaaagagccttgacttcccttgttttccccccttgcgcccaacgtgcgtccgctcccccgccgagcgcggagtcgcctcagttgcccaggcctctatctgcatggagggccgggccgccgtggccagatctgcgcacggggtacggacgtgcccgggcagatgggggcctacggggtgacaccgaggccgggacagcttcaggggccccagaaggacctgacccagaaattgaggtccccgctgccttctgaggagggggaggagttgctcctaggtctgaaccccgccagccttgccccgtaggaagctggagtgcgggcctcgtccacccacagaccccggggagcgcagggaaaagggtgcttcggtcgttccgatggcagtggagaccacggtccacactcacctctctgcgtctccaccgcagggctctccctacgaccacacacccggcatggcgggctccttggggtaccatccttacgcggcgcccctgggatcgtacccttacggggacccagcgtaccggaagaacgccacaagggacgccacggctaccctcaaggcctggctcaacgagcaccgcaagaacccctaccccaccaagggcgagaagatcatgctggccatcatcaccaagatgaccctcacccaggtgtccacctggttcgccaacgcgcgccggcgcctcaagaaagagaataaaatgacgtggacgccgcggaaccgcagcgaggacgaggaagaggaggagaacattgacctggagaagaacgacgaggacgagccccagaagcccgaggacaagggcgaccccgagggccccgaagcaggttggtggacatgggaaagggcgtgttgggcgggagtaaaaaggaaaagagaggcctggagggggcgcgcacggggcctggaggttgggggcaggggtccctgcctttgcgggcgggaaccgggtcccgccgcgcggcctctgcgcccctgacagcctgggtttcgcccgcaggaggagctgagcagaaggcggcttcgggctgcgaacggcttcagggaccacccacccctgcaggcaaggagacggagggcagcctcagcgactcggattttaaggagccgccctcggagggccgcctcgacgcgctgcagggccccccccgcaccggcgggccctccccggctgggccagcggcggcgcggctggcggaggacccggcccctcactaccccgccggagcgccggcgcccggcccgcatccagccgcgggcgaggtgcctccgggtcccggcgggccctcggttatccattcgccgcctccgccgccgcctcctgcggtgctcgccaagcccaaactgtggtctttggcagagatcgccacatcgtcggacaaggtcaaggacgggggcggcgggaacgagggctctccatgcccaccgtgtcccgggcccatagccgggcaagccctaggaggcagccgggcgtcgccggccccggcgccgtcacgctcgccctcggcgcagtgtccttttccaggcgggacggtgctgtcccggcctctctactacaccgcgcccttctatcccggctacacgaactatggctccttcggacaccttcatggccacccggggcccgggccaggccccacaaccggtccggggtctcatttcaatggattaaaccagaccgtgttgaaccgagcggacgctttggctaaagacccgaaaatgttgcggagccagtctcagctagacctgtgcaaagactctccctatgaattgaagaaaggtatgtccgacatttaacgcgggctgcgtcggtcccggacttttctaatttattaaaaacatggccttggcagttatttttccatcaccgagagagagagacagagagagaaaataaactacccctcctattcagaagtttatagtttatggagatggatgacataaaaatgtaaacatctccacacaaaaaaaaaaatgtcttaaccaaccgaaaagaaaaattaaaaaaggatttgtattaaatcttattctgtatatttaatgtagcatttttgtatttaaattgataattcaatatctttgaagtaaattatgaaatcaagacacctgtacaggcatttaatgtttttttgtaatataaatatatacatttgtgtttcccccaaaactgtttcatagttaaaaaatacaagtttaatttaattttttacacctattgattctgctgggtatgagctaaagtattacagaaaggaaacaggttatactcttagatttaaaaagtgaaagaaactgcaggcgcctttgtaaaatgcaaaatatttaattaaaagagattttaacataatgagagccactcattactttttagaagcctcaataaactgtccattgccttggtcaaaa

SEQ ID NO: 14 - protein, 483 aa, Homo sapiens
MSYPQGYLYQPSASLALYSCPAYSTSVISGPRTDELGRSSSGSAFSPYAGSTAFTAPSPGYNSHLQYGADPAAAAAAAFSSYVGSPYDHTPGMAGSLGYHPYAAPLGSYPYGDPAYRKNATRDATATLKAWLNEHRKNPYPTKGEKIMLAIITKMTLTQVSTWFANARRRLKKENKMTWTPRNRSEDEEEEENIDLEKNDEDEPQKPEDKGDPEGPEAGGAEQKAASGCERLQGPPTPAGKETEGSLSDSDFKEPPSEGRLDALQGPPRTGGPSPAGPAAARLAEDPAPHYPAGAPAPGPHPAAGEVPPGPGGPSVIHSPPPPPPPAVLAKPKLWSLAEIATSSDKVKDGGGGNEGSPCPPCPGPIAGQALGGSRASPAPAPSRSPSAQCPFPGGTVLSRPLYYTAPFYPGYTNYGSFGHLHGHPGPGPGPTTGPGSHFNGLNQTVLNRADALAKDPKMLRSQSQLDLCKDSPYELKKGMSDI

SEQ ID NO: 15 - protein, 482 aa, Homo sapiens
MSYPQGYLYQPSASLALYSCPAYSTSVISGPRTDELGRSSSGSAFSPYAGSTAFTAPSPGYNSHLQYGADPAAAAAAAFSSYVGSPYDHTPGMAGSLGYHPYAAPLGSYPYGDPAYRKNATRDATATLKAWLNEHRKNPYPTKGEKIMLAIITKMTLTQVSTWFANARRRLKKENKMTWTPRNRSEDEEEEENIDLEKNDEDEPQKPEDKGDPEGPEAGAEQKAASGCERLQGPPTPAGKETEGSLSDSDFKEPPSEGRLDALQGPPRTGGPSPAGPAAARLAEDPAPHYPAGAPAPGPHPAAGEVPPGPGGPSVIHSPPPPPPPAVLAKPKLWSLAEIATSSDKVKDGGGGNEGSPCPPCPGPIAGQALGGSRASPAPAPSRSPSAQCPFPGGTVLSRPLYYTAPFYPGYTNYGSFGHLHGHPGPGPGPTTGPGSHFNGLNQTVLNRADALAKDPKMLRSQSQLDLCKDSPYELKKGMSDI

SEQ ID NO: 16 - protein, 413 aa, Homo sapiens
MEGRAAVARSAHGGSPYDHTPGMAGSLGYHPYAAPLGSYPYGDPAYRKNATRDATATLKAWLNEHRKNPYPTKGEKIMLAIITKMTLTQVSTWFANARRRLKKENKMTWTPRNRSEDEEEEENIDLEKNDEDEPQKPEDKGDPEGPEAGGAEQKAASGCERLQGPPTPAGKETEGSLSDSDFKEPPSEGRLDALQGPPRTGGPSPAGPAAARLAEDPAPHYPAGAPAPGPHPAAGEVPPGPGGPSVIHSPPPPPPPAVLAKPKLWSLAEIATSSDKVKDGGGGNEGSPCPPCPGPIAGQALGGSRASPAPAPSRSPSAQCPFPGGTVLSRPLYYTAPFYPGYTNYGSFGHLHGHPGPGPGPTTGPGSHFNGLNQTVLNRADALAKDPKMLRSQSQLDLCKDSPYELKKGMSDI

SEQ ID NO: 17 - DNA, 4153 bp, Homo sapiens
  source 1..4153: mol_type = genomic DNA
  CDS 1322..2470: protein_id = 18; translation = MLTRLFSEPGLLSDVPKFASWGDGEDDEPRSDKGDAPPPPPPAPGP GAPGPARAAKPVPLRGEEGTEATLAEVKEEGELGGEEEEEEEEEEGLDEAEGERPKKRG PKKRKMTKARLERSKLRRQKANARERNRMHDLNAALDNLRKVVPCYSKTQKLSKIETLR LAKNYIWALSEILRSGKRPDLVSYVQTLCKGLSQPTTNLVAGCLQLNSRNFLTEQGADG AGRFHGSGGPFAMHPYPYPCSRLAGAQCQAAGGLGGGAAHALRTHGYCAAYETLYAAAG GGGASPDYNSSEYEGPLSPPLCLNGNFSLKQDSSPDHEKSYHYSMHYSALPGSRPTGHG LVFGSSAVRGGVHSENLLSYDMHLHHDRGPMYEELNAFFHN
agagatgccacactcgctccgcggttcgcatggcgctctgaagacgccggcgcccgccgccttgaggagccgctgcccccgctccctgaagatgggggaacaatgaaataagcgagaagatccctcttctcccccctctctctcttgccccctccccccctcccctcccctctccccttgactcctctccgaggtaagttgtccgaaagggagcgagatctgacccgccggttgggaggaggggcggcagcttcggccgacaggagggtcctcaaatacctccttcctgggatgatgcccccctcattgggtgggcatcggaggggccccaggttctctctcccttaggggctgcagcccagggggctgcagaggaggtgtctctgcctgcgatgggctcggtggggggggaaggcaggatcacggagggggatatgcgaagaggccgagacggaggacccctccatggttgtcccaaaaagcctgccacctttccccaccaccgaaaaaagggaagcaaacaaacaaatttggatttttcccccatcaatcccaaaatacaacgagatctgaagagccttgtgggagggagtcagcttgaagggggaagggggtccctgaccgcagaggggacggactgggctcgcttctctcagtctcctccccacgccccgctgcttcagtcctcgccgcccagagccggctccgggagctggggacgcatcggctagaggagacgatcctcccgcctctggaattgggggtgcgggggtgggggccgagcaaggggcggcgcgcagccaagttgcaaattggattagggagcgtgggggtgagagccacgggaggggtgagggagctgggccggggggcccgggccgcgagagcgcggagcggggcagctgtccccaccggcggccgaccagcctctctccaccgccaggagagaacgggctttcagggcgagcgcgccgcctcccctggcaaagatatctggtccctaaaacccccacccggtccctgccctgaccctgagaagaagcaggcgcggggagcagccccccattcaagcgaggggcggagccggggcccagcgccggggagagggcctgggccgagatcccaggccggcagccgggtagggctgggccggctctgggcggggcaggcggcggaggtgggcatccagggtagcctaggcaggagcccgcacgagactcgggggtggaggagggttgtgggggggcgtcggtaccccagcgcgcccctcactttgtgctgtctgtctccccttcccgcccgcggggcgccctcaggcaccatgctgacccgcctgttcagcgagcccggccttctctcggacgtgcccaagttcgccagctggggcgacggcgaagacgacgagccgaggagcgacaagggcgacgcgccgccaccgccaccgcctgcgcccgggccaggggctccggggccagcccgggcggccaagccagtccctctccgtggagaagaggggacggaggccacgttggccgaggtcaaggaggaaggcgagctggggggagaggaggaggaggaagaggaggaggaagaaggactggacgaggcggagggcgagcggcccaagaagcgcgggcccaagaagcgcaagatgaccaaggcgcgcttggagcgctccaagcttcggcggcagaaggcgaacgcgcgggagcgcaaccgcatgcacgacctgaacgcagccctggacaacctgcgcaaggtggtgccctgctactccaagacgcagaagctgtccaagatcgagacgctgcgcctagccaagaactatatctgggcgctctcggagatcctgcgctccggcaagcggccagacctagtgtcctacgtgcagactctgtgcaagggtctgtcgcagcccaccaccaatctggtggccggctgtctgcagctcaactctcgcaacttcctcacggagcaaggcgccgacggtgccggccgcttccacggctcgggcggcccgttcgccatgcacccctacccgtacccgtgctcgcgcctggcgggcgcacagtgccaggcggccggcggcctgggcggcggcgcggcgcacgccctgcggacccacggctactgcgccgcctacgagacgctgtatgcggcggcaggcggtggcggcgcgagcccggactacaacagctccgagtacgagggcccgctcagccccccgctctgtctcaatggcaacttctcactcaagcaggactcctcgcccgaccacgagaaaagctaccactactctatgcactactcggcgctgcccggttcgcggcccacgggccacgggctagtcttcggctcgtcggctgtgcgcgggggcgtccactcggagaatctcttgtcttacgatatgcaccttcaccacgaccggggccccatgtacgaggagctcaatgcgttttttcataactgagacttcgcgccggctcccttctttttcttttgcctttgcccgcccccctgtccccagcccccagagcgcagggacacccccatcctaccccggcgccgggcgcggggagcgggccaccggtcctgccgctctcctggggcagcgcagtcctgttacctgtgggtggcctgtcccaggggcctcgcttcccccaggggactcgccttctctctccccaaggggttccctcctcctctctcccaaggagtgcttctccagggacctctctccgggggctccctggaggcacccctcccccattcccaatatcttcgctgaggtttcctcctccccctcctccctgcaggcccaaggcgttggtaagggggcagctgagcaatggaacgcgtttccccctctcattattattttaaaaacagacacccagctgccgaggcaaaaaggagccaggcgctccctctttcttgaagagggtagaagttagggcgccggagcccgggcctggaacgccctcacccccaacctccagtctccgcgttttgcgattttaattttggcgggaggggaagtggattgagaggaaagagagaggccaagacaatttgtaactagaatccgtttttcccttttcctttttttaaacaaacaaacatacaaaaaaaaaaaaaaaaaaaaaaaaaaaaaaaaaaaaaaaagctaagaggcgacggaagccgaacgcagagtccggatcggagagaaaacgcagtaaggacttttagaagcaataaaaggcaaaaaaaacaaaaaacaaaaaaacaaacaaaaaaaaaccactactaccaataatcaaagacacaaatatctatgcaaggaggctccactgagcctcgcggcccggcccggccccgggatgccccgcccggcctgcgggccgccccgcccgagcgcggatctgtgcactttggtgaagtgggggcccgcgccgccccctccccctccccaggttcttacaatcagtgactcggagatttggggccccagtgccactgccctcccccgccccgtccccgttgtgcgtcatgctgttttttaaaaacctgtttccaaatttgtatggaatggcaaactgttggggggtcggtttggggagggagggtttgcatgaaagacacacgcacaccacaccgcacgcacaagcaggcccggcgccggcgtccggggggcagaaggaggtgagctcgccggctcctcctccccgcggccattctgtcccctcctggggtgaggggtggggatggagacctgggggcagccccacccctgcccggactgtgcctcggtgggtgccacctggcgatttccggtgtctggagagagtattttttggtccaaggagtcctcttggctttagctggtgggtgggcggggagaggtctgagggctcctactggaggttcccccaaaaaggggcaaaaggagaccctctgcccaccggaggcaggggatcaggcatccaaatacacgatgcaaaaatgcaatcccacaggcgacacacccacacactcacccacacacacgcaattttaccttcctcttgtagcgaagatgaaactcccgtcggacacccgaagtgcattgcgtgtttctgttcagtttaatgacgattaataaatatttatgtaaatgagatgcaaagccgga

SEQ ID NO: 18 - protein, 382 aa, Homo sapiens
MLTRLFSEPGLLSDVPKFASWGDGEDDEPRSDKGDAPPPPPPAPGPGAPGPARAAKPVPLRGEEGTEATLAEVKEEGELGGEEEEEEEEEEGLDEAEGERPKKRGPKKRKMTKARLERSKLRRQKANARERNRMHDLNAALDNLRKVVPCYSKTQKLSKIETLRLAKNYIWALSEILRSGKRPDLVSYVQTLCKGLSQPTTNLVAGCLQLNSRNFLTEQGADGAGRFHGSGGPFAMHPYPYPCSRLAGAQCQAAGGLGGGAAHALRTHGYCAAYETLYAAAGGGGASPDYNSSEYEGPLSPPLCLNGNFSLKQDSSPDHEKSYHYSMHYSALPGSRPTGHGLVFGSSAVRGGVHSENLLSYDMHLHHDRGPMYEELNAFFHN

SEQ ID NO: 19 - DNA, 403997 bp, Homo sapiens
  source 1..403997: mol_type = genomic DNA
  CDS join(439..572,2787..2943,3511..3574,4242..4297,15178..15251,259807..259888,276600..276717,303442..303572,322378..322504,368760..368848,385735..385800,386770..386947,387584..387763,391744..391938,400775..400806): protein_id = 20; translation = MFGIQESIQRSGSSMKEEPLGSGMNAVRTWMQGAGVLDANTAAQSG VGLARAHFEKQPPSNLRKSNFFHFVLALYDRQGQPVEIERTAFVGFVEKEKEANSEKTN NGIHYRLQLLYSNGIRTEQDFYVRLIDSMTKQAIVYEGQDKNPEMCRVLLTHEIMCRFF LKFFLKCNQNCLKNAGNPRDMRRFQVVVSTTVNVDGHVLAVSDNMFVHNNSKHGRRARR LDPSEATPCIKAISPSEGWTTGGATVIIIGDNFFDGLQVIFGTMLVWSELITPHAIRVQ TPPRHIPGVVEVTLSYKSKQFCKGTPGRFIYTALNEPTIDYGFQRLQKVIPRHPGDPER LPKEVILKRAADLVEALYGMPHNNQEIILKRAADIAEALYSVPRNHNQLPALANTSVHA GMMGVNSFSGQLAVNVSEASQATNQGFTRNSSSVSPHGYVPSTTPQQTNYNSVTTSMNG YGSAAMSNLGGSPTFLNGSAANSPYAIVPSSPTMASSTSLPSNCSSSSGIFSFSPANMV SAVKQKSAFAPVVRPQTSPPPTCTSTNGNSLQAISGMIVPPM
  CDS join(439..572,2787..2943,3511..3574,4242..4297,15178..15251,26453..26521,259807..259888,276600..276717,303442..303572,322378..322504,368760..368848,385735..385800,386770..386947,387584..387763,391744..391938,400775..400806): protein_id = 21; translation = MFGIQESIQRSGSSMKEEPLGSGMNAVRTWMQGAGVLDANTAAQSG VGLARAHFEKQPPSNLRKSNFFHFVLALYDRQGQPVEIERTAFVGFVEKEKEANSEKTN NGIHYRLQLLYSNGIRTEQDFYVRLIDSMTKQAIVYEGQDKNPEMCRVLLTHEIMCSRC CDKKSCGNRNETPSDPVIIDRFFLKFFLKCNQNCLKNAGNPRDMRRFQVVVSTTVNVDG HVLAVSDNMFVHNNSKHGRRARRLDPSEATPCIKAISPSEGWTTGGATVIIIGDNFFDG LQVIFGTMLVWSELITPHAIRVQTPPRHIPGVVEVTLSYKSKQFCKGTPGRFIYTALNE PTIDYGFQRLQKVIPRHPGDPERLPKEVILKRAADLVEALYGMPHNNQEIILKRAADIA EALYSVPRNHNQLPALANTSVHAGMMGVNSFSGQLAVNVSEASQATNQGFTRNSSSVSP HGYVPSTTPQQTNYNSVTTSMNGYGSAAMSNLGGSPTFLNGSAANSPYAIVPSSPTMAS STSLPSNCSSSSGIFSFSPANMVSAVKQKSAFAPVVRPQTSPPPTCTSTNGNSLQAISG MIVPPM
  CDS join(439..572,2787..2943,3511..3574,4242..4297,15178..15251,26453..26521,259807..259888,276600..276717,303439..303572,322378..322504,368760..368848,385735..385800,386770..386947,387584..387763,391744..391938,400775..400806): protein_id = 22; translation = MFGIQESIQRSGSSMKEEPLGSGMNAVRTWMQGAGVLDANTAAQSG VGLARAHFEKQPPSNLRKSNFFHFVLALYDRQGQPVEIERTAFVGFVEKEKEANSEKTN NGIHYRLQLLYSNGIRTEQDFYVRLIDSMTKQAIVYEGQDKNPEMCRVLLTHEIMCSRC CDKKSCGNRNETPSDPVIIDRFFLKFFLKCNQNCLKNAGNPRDMRRFQVVVSTTVNVDG HVLAVSDNMFVHNNSKHGRRARRLDPSEAATPCIKAISPSEGWTTGGATVIIIGDNFFD GLQVIFGTMLVWSELITPHAIRVQTPPRHIPGVVEVTLSYKSKQFCKGTPGRFIYTALN EPTIDYGFQRLQKVIPRHPGDPERLPKEVILKRAADLVEALYGMPHNNQEIILKRAADI AEALYSVPRNHNQLPALANTSVHAGMMGVNSFSGQLAVNVSEASQATNQGFTRNSSSVS PHGYVPSTTPQQTNYNSVTTSMNGYGSAAMSNLGGSPTFLNGSAANSPYAIVPSSPTMA SSTSLPSNCSSSSGIFSFSPANMVSAVKQKSAFAPVVRPQTSPPPTCTSTNGNSLQAIS GMIVPPM
  CDS join(439..572,2787..2943,3511..3574,4242..4297,15178..15251,26453..26521,259807..259888,276600..276741,303442..303572,322378..322504,368760..368848,385735..385800,386770..386947,391744..391938,400775..400806): protein_id = 23; translation = MFGIQESIQRSGSSMKEEPLGSGMNAVRTWMQGAGVLDANTAAQSG VGLARAHFEKQPPSNLRKSNFFHFVLALYDRQGQPVEIERTAFVGFVEKEKEANSEKTN NGIHYRLQLLYSNGIRTEQDFYVRLIDSMTKQAIVYEGQDKNPEMCRVLLTHEIMCSRC CDKKSCGNRNETPSDPVIIDRFFLKFFLKCNQNCLKNAGNPRDMRRFQVVVSTTVNVDG HVLAVSDNMFVHNNSKHGRRARRLDPSEGTPSYLEHATPCIKAISPSEGWTTGGATVII IGDNFFDGLQVIFGTMLVWSELITPHAIRVQTPPRHIPGVVEVTLSYKSKQFCKGTPGR FIYTALNEPTIDYGFQRLQKVIPRHPGDPERLPKEVILKRAADLVEALYGMPHNNQEII LKRAADIAEALYSVPRNHNQLPALANTSVHAGMMGVNSFSGQLAVNVSEASQATNQVVP SSPTMASSTSLPSNCSSSSGIFSFSPANMVSAVKQKSAFAPVVRPQTSPPPTCTSTNGN SLQAISGMIVPPM
  CDS join(439..572,2787..2943,3511..3574,4242..4297,15178..15251,26453..26521,259807..259888,276600..276741,303442..303572,322378..322504,368760..368848,385735..385800,386770..386947,387584..387763,391744..391938,400775..400806): protein_id = 24; translation = MFGIQESIQRSGSSMKEEPLGSGMNAVRTWMQGAGVLDANTAAQSG VGLARAHFEKQPPSNLRKSNFFHFVLALYDRQGQPVEIERTAFVGFVEKEKEANSEKTN NGIHYRLQLLYSNGIRTEQDFYVRLIDSMTKQAIVYEGQDKNPEMCRVLLTHEIMCSRC CDKKSCGNRNETPSDPVIIDRFFLKFFLKCNQNCLKNAGNPRDMRRFQVVVSTTVNVDG HVLAVSDNMFVHNNSKHGRRARRLDPSEGTPSYLEHATPCIKAISPSEGWTTGGATVII IGDNFFDGLQVIFGTMLVWSELITPHAIRVQTPPRHIPGVVEVTLSYKSKQFCKGTPGR FIYTALNEPTIDYGFQRLQKVIPRHPGDPERLPKEVILKRAADLVEALYGMPHNNQEII LKRAADIAEALYSVPRNHNQLPALANTSVHAGMMGVNSFSGQLAVNVSEASQATNQGFT RNSSSVSPHGYVPSTTPQQTNYNSVTTSMNGYGSAAMSNLGGSPTFLNGSAANSPYAIV PSSPTMASSTSLPSNCSSSSGIFSFSPANMVSAVKQKSAFAPVVRPQTSPPPTCTSTNG NSLQAISGMIVPPM
  CDS join(439..572,2787..2943,3511..3574,4242..4297,15178..15251,26453..26521,259807..259888,276600..276741,303439..303572,322378..322504,368760..368848,385735..385800,386770..386947,387584..387763,391744..391938,400775..400806): protein_id = 25; translation = MFGIQESIQRSGSSMKEEPLGSGMNAVRTWMQGAGVLDANTAAQSG VGLARAHFEKQPPSNLRKSNFFHFVLALYDRQGQPVEIERTAFVGFVEKEKEANSEKTN NGIHYRLQLLYSNGIRTEQDFYVRLIDSMTKQAIVYEGQDKNPEMCRVLLTHEIMCSRC CDKKSCGNRNETPSDPVIIDRFFLKFFLKCNQNCLKNAGNPRDMRRFQVVVSTTVNVDG HVLAVSDNMFVHNNSKHGRRARRLDPSEGTPSYLEHAATPCIKAISPSEGWTTGGATVI IIGDNFFDGLQVIFGTMLVWSELITPHAIRVQTPPRHIPGVVEVTLSYKSKQFCKGTPG RFIYTALNEPTIDYGFQRLQKVIPRHPGDPERLPKEVILKRAADLVEALYGMPHNNQEI ILKRAADIAEALYSVPRNHNQLPALANTSVHAGMMGVNSFSGQLAVNVSEASQATNQGF TRNSSSVSPHGYVPSTTPQQTNYNSVTTSMNGYGSAAMSNLGGSPTFLNGSAANSPYAI VPSSPTMASSTSLPSNCSSSSGIFSFSPANMVSAVKQKSAFAPVVRPQTSPPPTCTSTN GNSLQAISGMIVPPM
  CDS join(2673..2692,2787..2943,3511..3574,4242..4297,15178..15251,26453..26521,259807..259888,276600..276717,303442..303572,322378..322504,368760..368848,385735..385800,386770..386947,387584..387763,391744..391938,400775..400806): protein_id = 26; translation = MFWGKRSGVGLARAHFEKQPPSNLRKSNFFHFVLALYDRQGQPVEI ERTAFVGFVEKEKEANSEKTNNGIHYRLQLLYSNGIRTEQDFYVRLIDSMTKQAIVYEG QDKNPEMCRVLLTHEIMCSRCCDKKSCGNRNETPSDPVIIDRFFLKFFLKCNQNCLKNA GNPRDMRRFQVVVSTTVNVDGHVLAVSDNMFVHNNSKHGRRARRLDPSEATPCIKAISP SEGWTTGGATVIIIGDNFFDGLQVIFGTMLVWSELITPHAIRVQTPPRHIPGVVEVTLS YKSKQFCKGTPGRFIYTALNEPTIDYGFQRLQKVIPRHPGDPERLPKEVILKRAADLVE ALYGMPHNNQEIILKRAADIAEALYSVPRNHNQLPALANTSVHAGMMGVNSFSGQLAVN VSEASQATNQGFTRNSSSVSPHGYVPSTTPQQTNYNSVTTSMNGYGSAAMSNLGGSPTF LNGSAANSPYAIVPSSPTMASSTSLPSNCSSSSGIFSFSPANMVSAVKQKSAFAPVVRP QTSPPPTCTSTNGNSLQAISGMIVPPM
  CDS join(2673..2692,2787..2943,3511..3574,4242..4297,15178..15251,26453..26521,259807..259888,276600..276741,303442..303572,322378..322504,368760..368848,385735..385800,386770..386947,387584..387763,391744..391938,400775..400806): protein_id = 27; translation = MFWGKRSGVGLARAHFEKQPPSNLRKSNFFHFVLALYDRQGQPVEI ERTAFVGFVEKEKEANSEKTNNGIHYRLQLLYSNGIRTEQDFYVRLIDSMTKQAIVYEG QDKNPEMCRVLLTHEIMCSRCCDKKSCGNRNETPSDPVIIDRFFLKFFLKCNQNCLKNA GNPRDMRRFQVVVSTTVNVDGHVLAVSDNMFVHNNSKHGRRARRLDPSEGTPSYLEHAT PCIKAISPSEGWTTGGATVIIIGDNFFDGLQVIFGTMLVWSELITPHAIRVQTPPRHIP GVVEVTLSYKSKQFCKGTPGRFIYTALNEPTIDYGFQRLQKVIPRHPGDPERLPKEVIL KRAADLVEALYGMPHNNQEIILKRAADIAEALYSVPRNHNQLPALANTSVHAGMMGVNS FSGQLAVNVSEASQATNQGFTRNSSSVSPHGYVPSTTPQQTNYNSVTTSMNGYGSAAMS NLGGSPTFLNGSAANSPYAIVPSSPTMASSTSLPSNCSSSSGIFSFSPANMVSAVKQKS AFAPVVRPQTSPPPTCTSTNGNSLQAISGMIVPPM
  CDS join(2673..2692,2787..2943,3511..3574,4242..4297,15178..15251,26453..26521,259807..259888,276600..276741,303439..303572,322378..322504,368760..368848,385735..385800,386770..386947,387584..387763,391744..391938,400775..400806): protein_id = 28; translation = MFWGKRSGVGLARAHFEKQPPSNLRKSNFFHFVLALYDRQGQPVEI ERTAFVGFVEKEKEANSEKTNNGIHYRLQLLYSNGIRTEQDFYVRLIDSMTKQAIVYEG QDKNPEMCRVLLTHEIMCSRCCDKKSCGNRNETPSDPVIIDRFFLKFFLKCNQNCLKNA GNPRDMRRFQVVVSTTVNVDGHVLAVSDNMFVHNNSKHGRRARRLDPSEGTPSYLEHAA TPCIKAISPSEGWTTGGATVIIIGDNFFDGLQVIFGTMLVWSELITPHAIRVQTPPRHI PGVVEVTLSYKSKQFCKGTPGRFIYTALNEPTIDYGFQRLQKVIPRHPGDPERLPKEVI LKRAADLVEALYGMPHNNQEIILKRAADIAEALYSVPRNHNQLPALANTSVHAGMMGVN SFSGQLAVNVSEASQATNQGFTRNSSSVSPHGYVPSTTPQQTNYNSVTTSMNGYGSAAM SNLGGSPTFLNGSAANSPYAIVPSSPTMASSTSLPSNCSSSSGIFSFSPANMVSAVKQK SAFAPVVRPQTSPPPTCTSTNGNSLQAISGMIVPPM
  CDS join(4286..4297,15178..15251,26453..26521,259807..259888,276600..276717,303442..303572,322378..322504,368760..368848,385735..385800,386770..386947,387584..387763,391744..391938,400775..400806): protein_id = 29; translation = MTKQAIVYEGQDKNPEMCRVLLTHEIMCSRCCDKKSCGNRNETPSD PVIIDRFFLKFFLKCNQNCLKNAGNPRDMRRFQVVVSTTVNVDGHVLAVSDNMFVHNNS KHGRRARRLDPSEATPCIKAISPSEGWTTGGATVIIIGDNFFDGLQVIFGTMLVWSELI TPHAIRVQTPPRHIPGVVEVTLSYKSKQFCKGTPGRFIYTALNEPTIDYGFQRLQKVIP RHPGDPERLPKEVILKRAADLVEALYGMPHNNQEIILKRAADIAEALYSVPRNHNQLPA LANTSVHAGMMGVNSFSGQLAVNVSEASQATNQGFTRNSSSVSPHGYVPSTTPQQTNYN SVTTSMNGYGSAAMSNLGGSPTFLNGSAANSPYAIVPSSPTMASSTSLPSNCSSSSGIF SFSPANMVSAVKQKSAFAPVVRPQTSPPPTCTSTNGNSLQAISGMIVPPM
  CDS join(4286..4297,15178..15251,26453..26521,259807..259888,276600..276741,303442..303572,322378..322504,368760..368848,385735..385800,386770..386947,387584..387763,391744..391938,400775..400806): protein_id = 30; translation = MTKQAIVYEGQDKNPEMCRVLLTHEIMCSRCCDKKSCGNRNETPSD PVIIDRFFLKFFLKCNQNCLKNAGNPRDMRRFQVVVSTTVNVDGHVLAVSDNMFVHNNS KHGRRARRLDPSEGTPSYLEHATPCIKAISPSEGWTTGGATVIIIGDNFFDGLQVIFGT MLVWSELITPHAIRVQTPPRHIPGVVEVTLSYKSKQFCKGTPGRFIYTALNEPTIDYGF QRLQKVIPRHPGDPERLPKEVILKRAADLVEALYGMPHNNQEIILKRAADIAEALYSVP RNHNQLPALANTSVHAGMMGVNSFSGQLAVNVSEASQATNQGFTRNSSSVSPHGYVPST TPQQTNYNSVTTSMNGYGSAAMSNLGGSPTFLNGSAANSPYAIVPSSPTMASSTSLPSN CSSSSGIFSFSPANMVSAVKQKSAFAPVVRPQTSPPPTCTSTNGNSLQAISGMIVPPM
  CDS join(4286..4297,15178..15251,26453..26521,259807..259888,276600..276741,303439..303572,322378..322504,368760..368848,385735..385800,386770..386947,387584..387763,391744..391938,400775..400806): protein_id = 31; translation = MTKQAIVYEGQDKNPEMCRVLLTHEIMCSRCCDKKSCGNRNETPSD PVIIDRFFLKFFLKCNQNCLKNAGNPRDMRRFQVVVSTTVNVDGHVLAVSDNMFVHNNS KHGRRARRLDPSEGTPSYLEHAATPCIKAISPSEGWTTGGATVIIIGDNFFDGLQVIFG TMLVWSELITPHAIRVQTPPRHIPGVVEVTLSYKSKQFCKGTPGRFIYTALNEPTIDYG FQRLQKVIPRHPGDPERLPKEVILKRAADLVEALYGMPHNNQEIILKRAADIAEALYSV PRNHNQLPALANTSVHAGMMGVNSFSGQLAVNVSEASQATNQGFTRNSSSVSPHGYVPS TTPQQTNYNSVTTSMNGYGSAAMSNLGGSPTFLNGSAANSPYAIVPSSPTMASSTSLPS NCSSSSGIFSFSPANMVSAVKQKSAFAPVVRPQTSPPPTCTSTNGNSLQAISGMIVPPM
  CDS join(259874..259888,276600..276741,303439..303572,322378..322504,368760..368848,385735..385800,386770..386947,387584..387763,391744..391938,400775..400806): protein_id = 32; translation = MRRFQVVVSTTVNVDGHVLAVSDNMFVHNNSKHGRRARRLDPSEGT PSYLEHAATPCIKAISPSEGWTTGGATVIIIGDNFFDGLQVIFGTMLVWSELITPHAIR VQTPPRHIPGVVEVTLSYKSKQFCKGTPGRFIYTALNEPTIDYGFQRLQKVIPRHPGDP ERLPKEVILKRAADLVEALYGMPHNNQEIILKRAADIAEALYSVPRNHNQLPALANTSV HAGMMGVNSFSGQLAVNVSEASQATNQGFTRNSSSVSPHGYVPSTTPQQTNYNSVTTSM NGYGSAAMSNLGGSPTFLNGSAANSPYAIVPSSPTMASSTSLPSNCSSSSGIFSFSPAN MVSAVKQKSAFAPVVRPQTSPPPTCTSTNGNSLQAISGMIVPPM
  CDS join(439..572,2787..2943,3511..3574,4242..4297,15178..15251,26453..26521,259807..259888,276600..276717,303442..303572,322378..322504,368760..368848,385735..385800,386770..386947,387584..387763,391744..391938,392281..392348): protein_id = 33; translation = MFGIQESIQRSGSSMKEEPLGSGMNAVRTWMQGAGVLDANTAAQSG VGLARAHFEKQPPSNLRKSNFFHFVLALYDRQGQPVEIERTAFVGFVEKEKEANSEKTN NGIHYRLQLLYSNGIRTEQDFYVRLIDSMTKQAIVYEGQDKNPEMCRVLLTHEIMCSRC CDKKSCGNRNETPSDPVIIDRFFLKFFLKCNQNCLKNAGNPRDMRRFQVVVSTTVNVDG HVLAVSDNMFVHNNSKHGRRARRLDPSEATPCIKAISPSEGWTTGGATVIIIGDNFFDG LQVIFGTMLVWSELITPHAIRVQTPPRHIPGVVEVTLSYKSKQFCKGTPGRFIYTALNE PTIDYGFQRLQKVIPRHPGDPERLPKEVILKRAADLVEALYGMPHNNQEIILKRAADIA EALYSVPRNHNQLPALANTSVHAGMMGVNSFSGQLAVNVSEASQATNQGFTRNSSSVSP HGYVPSTTPQQTNYNSVTTSMNGYGSAAMSNLGGSPTFLNGSAANSPYAIVPSSPTMAS STSLPSNCSSSSGIFSFSPANMVSAVKQKSAFAPVVRPQTSPPPTCTSTNGNSLQDQSF VDSSKFSSAGSLPGLAFS
  CDS join(439..572,2787..2943,3511..3574,4242..4297,15178..15251,26453..26521,259807..259888,276600..276717,303439..303572,322378..322504,368760..368848,385735..385800,386770..386947,387584..387763,391744..391938,392281..392348): protein_id = 34; translation = MFGIQESIQRSGSSMKEEPLGSGMNAVRTWMQGAGVLDANTAAQSG VGLARAHFEKQPPSNLRKSNFFHFVLALYDRQGQPVEIERTAFVGFVEKEKEANSEKTN NGIHYRLQLLYSNGIRTEQDFYVRLIDSMTKQAIVYEGQDKNPEMCRVLLTHEIMCSRC CDKKSCGNRNETPSDPVIIDRFFLKFFLKCNQNCLKNAGNPRDMRRFQVVVSTTVNVDG HVLAVSDNMFVHNNSKHGRRARRLDPSEAATPCIKAISPSEGWTTGGATVIIIGDNFFD GLQVIFGTMLVWSELITPHAIRVQTPPRHIPGVVEVTLSYKSKQFCKGTPGRFIYTALN EPTIDYGFQRLQKVIPRHPGDPERLPKEVILKRAADLVEALYGMPHNNQEIILKRAADI AEALYSVPRNHNQLPALANTSVHAGMMGVNSFSGQLAVNVSEASQATNQGFTRNSSSVS PHGYVPSTTPQQTNYNSVTTSMNGYGSAAMSNLGGSPTFLNGSAANSPYAIVPSSPTMA SSTSLPSNCSSSSGIFSFSPANMVSAVKQKSAFAPVVRPQTSPPPTCTSTNGNSLQDQS FVDSSKFSSAGSLPGLAFS
  CDS join(439..572,2787..2943,3511..3574,4242..4297,15178..15251,26453..26521,259807..259888,276600..276741,303442..303572,322378..322504,368760..368848,385735..385800,386770..386947,387584..387763,391744..391938,392281..392348): protein_id = 35; translation = MFGIQESIQRSGSSMKEEPLGSGMNAVRTWMQGAGVLDANTAAQSG VGLARAHFEKQPPSNLRKSNFFHFVLALYDRQGQPVEIERTAFVGFVEKEKEANSEKTN NGIHYRLQLLYSNGIRTEQDFYVRLIDSMTKQAIVYEGQDKNPEMCRVLLTHEIMCSRC CDKKSCGNRNETPSDPVIIDRFFLKFFLKCNQNCLKNAGNPRDMRRFQVVVSTTVNVDG HVLAVSDNMFVHNNSKHGRRARRLDPSEGTPSYLEHATPCIKAISPSEGWTTGGATVII IGDNFFDGLQVIFGTMLVWSELITPHAIRVQTPPRHIPGVVEVTLSYKSKQFCKGTPGR FIYTALNEPTIDYGFQRLQKVIPRHPGDPERLPKEVILKRAADLVEALYGMPHNNQEII LKRAADIAEALYSVPRNHNQLPALANTSVHAGMMGVNSFSGQLAVNVSEASQATNQGFT RNSSSVSPHGYVPSTTPQQTNYNSVTTSMNGYGSAAMSNLGGSPTFLNGSAANSPYAIV PSSPTMASSTSLPSNCSSSSGIFSFSPANMVSAVKQKSAFAPVVRPQTSPPPTCTSTNG NSLQDQSFVDSSKFSSAGSLPGLAFS
  CDS join(439..572,2787..2943,3511..3574,4242..4297,15178..15251,26453..26521,259807..259888,276600..276741,303439..303572,322378..322504,368760..368848,385735..385800,386770..386947,391744..391938,392281..392348): protein_id = 36; translation = MFGIQESIQRSGSSMKEEPLGSGMNAVRTWMQGAGVLDANTAAQSG VGLARAHFEKQPPSNLRKSNFFHFVLALYDRQGQPVEIERTAFVGFVEKEKEANSEKTN NGIHYRLQLLYSNGIRTEQDFYVRLIDSMTKQAIVYEGQDKNPEMCRVLLTHEIMCSRC CDKKSCGNRNETPSDPVIIDRFFLKFFLKCNQNCLKNAGNPRDMRRFQVVVSTTVNVDG HVLAVSDNMFVHNNSKHGRRARRLDPSEGTPSYLEHAATPCIKAISPSEGWTTGGATVI IIGDNFFDGLQVIFGTMLVWSELITPHAIRVQTPPRHIPGVVEVTLSYKSKQFCKGTPG RFIYTALNEPTIDYGFQRLQKVIPRHPGDPERLPKEVILKRAADLVEALYGMPHNNQEI ILKRAADIAEALYSVPRNHNQLPALANTSVHAGMMGVNSFSGQLAVNVSEASQATNQVV PSSPTMASSTSLPSNCSSSSGIFSFSPANMVSAVKQKSAFAPVVRPQTSPPPTCTSTNG NSLQDQSFVDSSKFSSAGSLPGLAFS
  CDS join(439..572,2787..2943,3511..3574,4242..4297,15178..15251,26453..26521,259807..259888,276600..276741,303439..303572,322378..322504,368760..368848,385735..385800,386770..386947,387584..387763,391744..391938,392281..392348): protein_id = 37; translation = MFGIQESIQRSGSSMKEEPLGSGMNAVRTWMQGAGVLDANTAAQSG VGLARAHFEKQPPSNLRKSNFFHFVLALYDRQGQPVEIERTAFVGFVEKEKEANSEKTN NGIHYRLQLLYSNGIRTEQDFYVRLIDSMTKQAIVYEGQDKNPEMCRVLLTHEIMCSRC CDKKSCGNRNETPSDPVIIDRFFLKFFLKCNQNCLKNAGNPRDMRRFQVVVSTTVNVDG HVLAVSDNMFVHNNSKHGRRARRLDPSEGTPSYLEHAATPCIKAISPSEGWTTGGATVI IIGDNFFDGLQVIFGTMLVWSELITPHAIRVQTPPRHIPGVVEVTLSYKSKQFCKGTPG RFIYTALNEPTIDYGFQRLQKVIPRHPGDPERLPKEVILKRAADLVEALYGMPHNNQEI ILKRAADIAEALYSVPRNHNQLPALANTSVHAGMMGVNSFSGQLAVNVSEASQATNQGF TRNSSSVSPHGYVPSTTPQQTNYNSVTTSMNGYGSAAMSNLGGSPTFLNGSAANSPYAI VPSSPTMASSTSLPSNCSSSSGIFSFSPANMVSAVKQKSAFAPVVRPQTSPPPTCTSTN GNSLQDQSFVDSSKFSSAGSLPGLAFS
  CDS join(2673..2692,2787..2943,3511..3574,4242..4297,15178..15251,26453..26521,259807..259888,276600..276717,303442..303572,322378..322504,368760..368848,385735..385800,386770..386947,387584..387763,391744..391938,392281..392348): protein_id = 38; translation = MFWGKRSGVGLARAHFEKQPPSNLRKSNFFHFVLALYDRQGQPVEI ERTAFVGFVEKEKEANSEKTNNGIHYRLQLLYSNGIRTEQDFYVRLIDSMTKQAIVYEG QDKNPEMCRVLLTHEIMCSRCCDKKSCGNRNETPSDPVIIDRFFLKFFLKCNQNCLKNA GNPRDMRRFQVVVSTTVNVDGHVLAVSDNMFVHNNSKHGRRARRLDPSEATPCIKAISP SEGWTTGGATVIIIGDNFFDGLQVIFGTMLVWSELITPHAIRVQTPPRHIPGVVEVTLS YKSKQFCKGTPGRFIYTALNEPTIDYGFQRLQKVIPRHPGDPERLPKEVILKRAADLVE ALYGMPHNNQEIILKRAADIAEALYSVPRNHNQLPALANTSVHAGMMGVNSFSGQLAVN VSEASQATNQGFTRNSSSVSPHGYVPSTTPQQTNYNSVTTSMNGYGSAAMSNLGGSPTF LNGSAANSPYAIVPSSPTMASSTSLPSNCSSSSGIFSFSPANMVSAVKQKSAFAPVVRP QTSPPPTCTSTNGNSLQDQSFVDSSKFSSAGSLPGLAFS
  CDS join(2673..2692,2787..2943,3511..3574,4242..4297,15178..15251,26453..26521,259807..259888,276600..276741,303442..303572,322378..322504,368760..368848,385735..385800,386770..386947,387584..387763,391744..391938,392281..392348): protein_id = 39; translation = MFWGKRSGVGLARAHFEKQPPSNLRKSNFFHFVLALYDRQGQPVEI ERTAFVGFVEKEKEANSEKTNNGIHYRLQLLYSNGIRTEQDFYVRLIDSMTKQAIVYEG QDKNPEMCRVLLTHEIMCSRCCDKKSCGNRNETPSDPVIIDRFFLKFFLKCNQNCLKNA GNPRDMRRFQVVVSTTVNVDGHVLAVSDNMFVHNNSKHGRRARRLDPSEGTPSYLEHAT PCIKAISPSEGWTTGGATVIIIGDNFFDGLQVIFGTMLVWSELITPHAIRVQTPPRHIP GVVEVTLSYKSKQFCKGTPGRFIYTALNEPTIDYGFQRLQKVIPRHPGDPERLPKEVIL KRAADLVEALYGMPHNNQEIILKRAADIAEALYSVPRNHNQLPALANTSVHAGMMGVNS FSGQLAVNVSEASQATNQGFTRNSSSVSPHGYVPSTTPQQTNYNSVTTSMNGYGSAAMS NLGGSPTFLNGSAANSPYAIVPSSPTMASSTSLPSNCSSSSGIFSFSPANMVSAVKQKS AFAPVVRPQTSPPPTCTSTNGNSLQDQSFVDSSKFSSAGSLPGLAFS
  CDS join(2673..2692,2787..2943,3511..3574,4242..4297,15178..15251,26453..26521,259807..259888,276600..276741,303439..303572,322378..322504,368760..368848,385735..385800,386770..386947,387584..387763,391744..391938,392281..392348): protein_id = 40; translation = MFWGKRSGVGLARAHFEKQPPSNLRKSNFFHFVLALYDRQGQPVEI ERTAFVGFVEKEKEANSEKTNNGIHYRLQLLYSNGIRTEQDFYVRLIDSMTKQAIVYEG QDKNPEMCRVLLTHEIMCSRCCDKKSCGNRNETPSDPVIIDRFFLKFFLKCNQNCLKNA GNPRDMRRFQVVVSTTVNVDGHVLAVSDNMFVHNNSKHGRRARRLDPSEGTPSYLEHAA TPCIKAISPSEGWTTGGATVIIIGDNFFDGLQVIFGTMLVWSELITPHAIRVQTPPRHI PGVVEVTLSYKSKQFCKGTPGRFIYTALNEPTIDYGFQRLQKVIPRHPGDPERLPKEVI LKRAADLVEALYGMPHNNQEIILKRAADIAEALYSVPRNHNQLPALANTSVHAGMMGVN SFSGQLAVNVSEASQATNQGFTRNSSSVSPHGYVPSTTPQQTNYNSVTTSMNGYGSAAM SNLGGSPTFLNGSAANSPYAIVPSSPTMASSTSLPSNCSSSSGIFSFSPANMVSAVKQK SAFAPVVRPQTSPPPTCTSTNGNSLQDQSFVDSSKFSSAGSLPGLAFS
  CDS join(4286..4297,15178..15251,26453..26521,259807..259888,276600..276741,303439..303572,322378..322504,368760..368848,385735..385800,386770..386947,387584..387763,391744..391938,392281..392348): protein_id = 41; translation = MTKQAIVYEGQDKNPEMCRVLLTHEIMCSRCCDKKSCGNRNETPSD PVIIDRFFLKFFLKCNQNCLKNAGNPRDMRRFQVVVSTTVNVDGHVLAVSDNMFVHNNS KHGRRARRLDPSEGTPSYLEHAATPCIKAISPSEGWTTGGATVIIIGDNFFDGLQVIFG TMLVWSELITPHAIRVQTPPRHIPGVVEVTLSYKSKQFCKGTPGRFIYTALNEPTIDYG FQRLQKVIPRHPGDPERLPKEVILKRAADLVEALYGMPHNNQEIILKRAADIAEALYSV PRNHNQLPALANTSVHAGMMGVNSFSGQLAVNVSEASQATNQGFTRNSSSVSPHGYVPS TTPQQTNYNSVTTSMNGYGSAAMSNLGGSPTFLNGSAANSPYAIVPSSPTMASSTSLPS NCSSSSGIFSFSPANMVSAVKQKSAFAPVVRPQTSPPPTCTSTNGNSLQDQSFVDSSKF SSAGSLPGLAFS
  CDS join(4286..4297,15178..15251,26453..26521,259807..259888,276600..276741,303439..303572,322378..322504,368760..368848,385735..385800,386770..386947,387584..387763,391744..391938,392281..392348): protein_id = 42; translation = MTKQAIVYEGQDKNPEMCRVLLTHEIMCSRCCDKKSCGNRNETPSD PVIIDRFFLKFFLKCNQNCLKNAGNPRDMRRFQVVVSTTVNVDGHVLAVSDNMFVHNNS KHGRRARRLDPSEGTPSYLEHAATPCIKAISPSEGWTTGGATVIIIGDNFFDGLQVIFG TMLVWSELITPHAIRVQTPPRHIPGVVEVTLSYKSKQFCKGTPGRFIYTALNEPTIDYG FQRLQKVIPRHPGDPERLPKEVILKRAADLVEALYGMPHNNQEIILKRAADIAEALYSV PRNHNQLPALANTSVHAGMMGVNSFSGQLAVNVSEASQATNQGFTRNSSSVSPHGYVPS TTPQQTNYNSVTTSMNGYGSAAMSNLGGSPTFLNGSAANSPYAIVPSSPTMASSTSLPS NCSSSSGIFSFSPANMVSAVKQKSAFAPVVRPQTSPPPTCTSTNGNSLQDQSFVDSSKF SSAGSLPGLAFS
  CDS join(259874..259888,276600..276741,303439..303572,322378..322504,368760..368848,385735..385800,386770..386947,387584..387763,391744..391938,392281..392348): protein_id = 43; translation = MRRFQVVVSTTVNVDGHVLAVSDNMFVHNNSKHGRRARRLDPSEGT PSYLEHAATPCIKAISPSEGWTTGGATVIIIGDNFFDGLQVIFGTMLVWSELITPHAIR VQTPPRHIPGVVEVTLSYKSKQFCKGTPGRFIYTALNEPTIDYGFQRLQKVIPRHPGDP ERLPKEVILKRAADLVEALYGMPHNNQEIILKRAADIAEALYSVPRNHNQLPALANTSV HAGMMGVNSFSGQLAVNVSEASQATNQGFTRNSSSVSPHGYVPSTTPQQTNYNSVTTSM NGYGSAAMSNLGGSPTFLNGSAANSPYAIVPSSPTMASSTSLPSNCSSSSGIFSFSPAN MVSAVKQKSAFAPVVRPQTSPPPTCTSTNGNSLQDQSFVDSSKFSSAGSLPGLAFS
  CDS join(259874..259888,276600..276741,303439..303572,322378..322504,368760..368848,385735..385800,386770..386947,387584..387763,391744..391938,392281..392348): protein_id = 44; translation = MRRFQVVVSTTVNVDGHVLAVSDNMFVHNNSKHGRRARRLDPSEGT PSYLEHAATPCIKAISPSEGWTTGGATVIIIGDNFFDGLQVIFGTMLVWSELITPHAIR VQTPPRHIPGVVEVTLSYKSKQFCKGTPGRFIYTALNEPTIDYGFQRLQKVIPRHPGDP ERLPKEVILKRAADLVEALYGMPHNNQEIILKRAADIAEALYSVPRNHNQLPALANTSV HAGMMGVNSFSGQLAVNVSEASQATNQGFTRNSSSVSPHGYVPSTTPQQTNYNSVTTSM NGYGSAAMSNLGGSPTFLNGSAANSPYAIVPSSPTMASSTSLPSNCSSSSGIFSFSPAN MVSAVKQKSAFAPVVRPQTSPPPTCTSTNGNSLQDQSFVDSSKFSSAGSLPGLAFS
  CDS join(439..572,2787..2943,3511..3574,4242..4297,15178..15251,26453..26521,259807..259888,276600..276741,303442..303572,322378..322504,340593..340639): protein_id = 45; translation = MFGIQESIQRSGSSMKEEPLGSGMNAVRTWMQGAGVLDANTAAQSG VGLARAHFEKQPPSNLRKSNFFHFVLALYDRQGQPVEIERTAFVGFVEKEKEANSEKTN NGIHYRLQLLYSNGIRTEQDFYVRLIDSMTKQAIVYEGQDKNPEMCRVLLTHEIMCSRC CDKKSCGNRNETPSDPVIIDRFFLKFFLKCNQNCLKNAGNPRDMRRFQVVVSTTVNVDG HVLAVSDNMFVHNNSKHGRRARRLDPSEGTPSYLEHATPCIKAISPSEGWTTGGATVII IGDNFFDGLQVIFGTMLVWSELITPHAIRVQTPPRHIPGVVEVTLSYKSKQFCKGTPGR FIYTGPWNKRLMPGDNKGE
  CDS join(439..572,2787..2943,3511..3574,4242..4297,15178..15251,26453..26521,259807..259888,276600..276741,303439..303572,322378..322504,340593..340639): protein_id = 46; translation = MFGIQESIQRSGSSMKEEPLGSGMNAVRTWMQGAGVLDANTAAQSG VGLARAHFEKQPPSNLRKSNFFHFVLALYDRQGQPVEIERTAFVGFVEKEKEANSEKTN NGIHYRLQLLYSNGIRTEQDFYVRLIDSMTKQAIVYEGQDKNPEMCRVLLTHEIMCSRC CDKKSCGNRNETPSDPVIIDRFFLKFFLKCNQNCLKNAGNPRDMRRFQVVVSTTVNVDG HVLAVSDNMFVHNNSKHGRRARRLDPSEGTPSYLEHAATPCIKAISPSEGWTTGGATVI IIGDNFFDGLQVIFGTMLVWSELITPHAIRVQTPPRHIPGVVEVTLSYKSKQFCKGTPG RFIYTGPWNKRLMPGDNKGE
  CDS join(2673..2692,2787..2943,3511..3574,4242..4297,15178..15251,26453..26521,259807..259888,276600..276717,303442..303572,322378..322504,340593..340639): protein_id = 47; translation = MFWGKRSGVGLARAHFEKQPPSNLRKSNFFHFVLALYDRQGQPVEI ERTAFVGFVEKEKEANSEKTNNGIHYRLQLLYSNGIRTEQDFYVRLIDSMTKQAIVYEG QDKNPEMCRVLLTHEIMCSRCCDKKSCGNRNETPSDPVIIDRFFLKFFLKCNQNCLKNA GNPRDMRRFQVVVSTTVNVDGHVLAVSDNMFVHNNSKHGRRARRLDPSEATPCIKAISP SEGWTTGGATVIIIGDNFFDGLQVIFGTMLVWSELITPHAIRVQTPPRHIPGVVEVTLS YKSKQFCKGTPGRFIYTGPWNKRLMPGDNKGE
cctgcttcttcaagtgaagggtacctctacaaaaggaaactccagcccctcctgtcctccaccggcctgtgatcattacaaaaaaaaaaaaaaaaaagcaaaaaaaaaaaaaaagcacccaaaccaaaaatcaaccaaccaaacaacccccaacagccaagcatacatctctaattttattattttggtcttttcgttggattttccctttcttctttttttcgggttatcgctcagttttgagcagaggtttacattttttaaaaatttgctttccagcccgccttgatcttctaagtgcgagttcatcgtctgagaaaaaaaaaaatctctggttggcgtttttgtttcttttcttttctttcttttctttcctttttttttttttttaatttttttcaagggggaggagattttccacaagaaaaggttgttttcatgtttgggattcaggaaagcatccaacggagtggaagcagcatgaaggaagagccgctgggcagcggcatgaacgcggtgcggacgtggatgcagggcgccggggtgctggacgccaacacggcggcgcagaggtgggtactgcgcggggaccgcggccgaggtgagccgcgagcgggagagccgggaggcggaggcggcagcggcagcggcagctgctgccgcggggccgggcggcggggtgagtccgcagccgctgcgctccgctctccgccggggctccgcgctctccagccgctctgccttcgtcgcctgcggccggaggacctggagctgtctgcgaggagcccacgctttgccagcactttcccctgcctcgtctgtgactgttttcattttgttttaacccagaagaggcgtctcaacacagcatgttggagatctgtgttttatgtttttatgtgattgctctttcttttccggccggctctcttttcttctttcccttcgctcttcctttccctcttttcttttttctttctttctttctcttccttccttcctttttctttcttttttctttttctttctttttttctttcctccttttctttttcctttttctttctctttcctcttcctgcctttcttttttctttcttccttctttcctttctcccccctttattttcttctcttctccttcctcttcctttcttcccctcttccctccttccatttctttcgttcttcgttctttcctgtctctcttcctgccttcttttctttcttctttctttcatttccttctctcatttctttcccccaccttcccttaatttctccctcactcttttccttcctcccttcctctctccattttctttctcttctttcttcagcttccctcctttctcctctttctcctttccttacctctctggctttcctgttttttcgtcccatttctcccctgagtcttctcttatttctgctatctcgttctccttccctccctctctgtctttcagttttttcttagtctaccggtagaatagcaactcccaactttaattctgatatctcccaaaagtcttctccagcccctgtcaccatggccccttccagcccttctctcactcgcagctccctagacactagactgtgtggcctggaggcattgcccttggaggttgacctgagggaactttcctgggcacacccaaggctctttcccaggctcctggtcccaagtgagaaatggcctttttccccccattaagccaccagctgagcttgggacagtgggagatctggtggccccaggccctatcggactcagagtgcggaaggggaagaaggaagatgactaattacatcatctccagcttccctgggctggggacaagtgtccccaacactgttcccatccccactgagtattaggatgggggtgggtggtagtgagagtgaattgggtaactgggctggaagtgaaagtgtgtgcgcggggcgctcgtgtgtgttcttctatgtgtgtgtgtgtgcctgtgcgcgcttgtgttgggcaggtccggctgtcagtggccgcctggcgccccaggcgctccagcctcccatcgccggccggcgcactgagccagcagccctggcctttaggatttctggaatgagtgtgaggatttctgcggaacagcgaaactttgttaggacaggtctttaagaaaacacccctcttccctttttcacagcgaccacccgcgacagttctgagccccgccctcggacccttctccacatgctttttggtggtggggggatgtggcttcccaaggccgggcactcgcagttggccagagcttgaggggttcctggagggtggctgctgcggcgagacgccgagcatgttttccatccattcccacctgccctgctagctgagacgtgagattcgaggggtgccggaatataactgtgggttctactccgcgaaggtgggttcacttcatccaccgccacttttcttcctccccacgcagtgcgtgtcaggtaggagtaaatgcttatagagtttcatctcgcgcgcaaaacccaaacaaaactttcacacctcttcagcgagttctgaggacgcacccgtccttggcggagaggacgaggacatgaggggacatgtgtgtcccgttgtcagctgggtctatgtcgcctgaaggggcgtgaagagcgcccactggatgttttgggggaagaggaggtgggtgtttgagggttcgagtgtgtgtacagggtgacaaggggcgcgggtcggcgtccggtttagccatctaactctgcgtctttggccgcagcggggtgggtctggcccgggctcactttgagaagcagccgccttccaatctgcggaaatccaacttcttccacttcgtcctggccctctacgacagacagggccagcccgtggagatcgagaggacagcgtttgtggggttcgtggagaaggaaaaagtaagtgggcgcagcgctgtcgcccctcgtccccggctcggctcgggagcaggcccgggagccttgggcagcgcgcccttccttgagtgcaaagcatccataacacacttctatgtgggggtcccccaagccacttcccatcccagacgaacccagggtcctggtccactggctccttctccagaaaagttcgcacggagcccccagagctagagagaggcaagcctggctctacaatccacagccatgggcacccggaatgaacccgccctccactaccagattacgcaccgcctgcctctggtggccggggcacgagcccctaggccctggaaagaggatagcctgtgtgcgcccgacggaattttcttttgggagagagggagcagtcaggaacagggggcggaggagggatcacaattggccacaatttctgctgctaccgtggctgcctggctcgccagcgggggtcccggcttggggaaagttgcctcgaaagttggtccactcgctcacgcagacctctctcctgcatctcttgtgtctttgcgtcctgatgcaacccaggaagccaacagcgaaaagaccaataacggaattcactaccggcttcagcttctctacagcaatggtgaggcccgggtcgggtctatggcctcaccctggggctccgggtctgggcagggggcgcagggagctccaggtggacgaaatcctccagcgaaggtcagtcatccgctttatttgaggtgaaccagcctctcctaaatttcgccccaggaggtttcacctgaggaggctcctagtggcccaagagccttatcggtctcgcgtttacctggggccaggtgtagtgcctcatccctccctgagccactttcattcttcctccccttcctgaggcctgttcctttggcttggcccaggctgcaggcccatggccccttgggcttaggggctgaagggtcatggccttgaaggctgtgtgcgagagcagagggactcttgccgtgagaacagacaagtcggggtacccccatcccagtcccagctgcagaacttggcgtctggcttccaggagcgctaaggcaaggccagcagcacctctctggacactggggaagggagatcgtggctgtattttccaggacagtgggagttccaatcagccttggagcccctttcgtgatatgtgtgtgggggttttgttgttattttttgttgttgttaattattgtccacccaccctccgtaacctctcacttaattctcctcccttcccccatttccaaccctagggataaggacggagcaggatttctacgtgcgcctcattgactccatgacaaaacaagtaagtttcttgattttgggccacggggggctctatgtcacaaaattcagggcagtcaagaagctagttgctccaccgcaggtgggctgggactctaactctaaaagccagcgggggcggctcagaccaaacttgcacggccttccagtgtccattcatgcgcttgcaccgccgcgtggggatgagggctcgacgcgcgcgcgtccctccaagggaactcgggccttgtgaattaagactgcagggtgctgagtggcgagaaaaagggctgaatttcctctgacccggccagggagccccgaagggctcaaaggtgcccagggaccctggtgcggagtgggctgaacctttgaaacccaagcaagccaggcctccccgggaagcagaggggcgaggggctgagggggcggaggaggggtggcagaggcggcttccccaggaatgatgagatgggctgagagcgcagatgaccattctgcagatttgttttcaaagggaatgatggtgaaggtagtgttgaaagagggagcgacaattgttagaggatattttgcaaaaaccctcctgcttttgcctccaagtttggcaggaagccaggcagcatgagtgagcttgtggtcttaaaggtacatagacggcattttcttaagctcccaacacgcgggtgtcaagcagtatacattaaggttgagttatggtttaaaagatacaattatgagccgagtcagaaaagaggcctgacgttttaatgaggcacaggagctttttccccttcttcttaattttaagaaaaagtttagtttcagaattaagtagctggttaggtagttggaggagttagtagcagaaaaaagaagacagctttattgggtgggggaaagaaattagaacaaagaaaaaagttatccattgtgtactaaccagcaatttagcaagaggattaaaatttatttacttgattgtgattttagaatgtttcctttaaaataagagaaatgattttctttcatagatattggctgagaaagtttcaaattagggtatatatgcatatttaaaaattatttttagatacaccacggcttaaatatgtggtagaaatgtcacattaataagctgttgggcattttaaaaatctaatcttcaagaaccaatttattaacagctatttttgatgatcactttcatatttcgatatgacacaagtagaaagcaagagtatgaaatctattttttaaaataaaaataaagattgaaatatatttcatgttatttgcctaaaatatttggctttcttaaaaatctgtttatttctcagttgattgctcagagtaaatcaccatttataatttttggtcttggttttattttctttaatggatttaataattgcataggataattcactttcatttggacactgtgtttttttttttttttttttttttttttttgccttccaaggcagaaacacaaaagcctgatttttaataactttttttcttttgcgatgtcaaaataaaaatgtcttaagtggagttttgttttcaaaaattgcctttgataccctggatatcctttcctgccattctcattacaggaaaaaaaaaaaaaaaaaagttgggagggagagggggaaagtaggaactctaagacatactctatgtgtatttattaggatttactttctaaaagataaaaggcacacatacacaaatcagtacataaggcctgtctgcttgtgcaacattgaccaatgaaatattaaattataggtagcactatgaaatgaacaattgtaagaagcacagaattaagacatgtttgaagtgattaatcgctctatgaattaaacctcctcaaaattttattttaagtctctctagtcaaaaagtgccactactaattgattttcccattatgggatgaacttaccttatactcatataaaaatgggggagaatcatcttttgatatttttaaagcaatacatcaaatatcattttactaacaaggtcatagagcttaagaaaaactgcagcttaaggcattctttgaccacttggtgtcataaattctatcaggaaagagggaggaagagagagagaaagagagagagaggaataagaacaagattagttttattttcgataatagcacttatgagaaagtcatttgccataatatgacatctcagtaaaagtcaaaattataaatgcatgcaatgatatattttggtggggagtggcctgagaaaaggttgaataattatctaagtctaaaaaatatcaggaaaaggaatatttcaaagcttacctgtgtgctttcataataattgtttaaccacctctctgtagctttcactttgaaaggcagttcctactcattatccaattgcttgttctttgattatgtgctgcaagagttttggaagtaggttagcttcttgtctacagggttaatacaatggcctccaaaaagcagatagatgagcgtgaagaagcttaactttccctaggtgtgacataaaaataattgatatttagccttaatgagtaaaacagttaattttcctctagcttgaaattattctatcataattaaataccaagtctgatttaaaatttcttgaatctttgattttagtttaatatacagtggctccttaaatcagatgtaagtcttgatataaactgatggattaaatgattacatttttttttcctgtgaaattcttcctcatacattatggattttgataattatttagagtacagaatgaaacacttctggtctgataagttctgataacatcatcaattgtggaaggaatacctagccactgttcaagtgtcttttcttagctgcctgtttattataacatttttcctatcagagatgcagctttatgtgagtgatgtcatattcttgactagaaagtggggttaaaactcaaaaggaattttggacaagcaaaatttaaaactatttttgcattctacatttccataaactgttcttgatcttgggtgggattagcagcattgagatagaaaagaaatgtactcaatcaaccaagatgtgttggtatgacacagtatttcacaccttttcaaagtgtctcattagactattttgggtaatgactcttaatttttggactctaccaggaaagatgaagcttcattagaaatgaatatataagaatctgagatcccttatccctatgccttcattgtaaagcacacaggatataatattttaaaaattcacccaccaactagaaaataagaggcttgcttttgggaagggttgttcaaaaccaagtttagctggactaaaaatagtttgttttcgtgtcattactgtttttggtattccattagtgagcatgcagaatgccctgtaggacccagaagtttatggctgctgcatccagaaacaatatctactgcagaagctcaaatgaatccagtgggggaggtctgaggtttagtgggcatcctttcagattttcatgtagtatttgaaatatgattacattctgtgattgctatagtgagttatatatctttaaatagttttttttaagtttagcttatctcccctcttaccatcttgctttaaaagagtgatattttataattcaaagaaaagataccaaattgtattaagttatcaaaacaaaacactcttcccctaaacaaaagcctgcttgagaagcaggaaatcgtagtcacataatccttgtatgtatggatttgaaagtagatgatgtagtgaggagaccgtgaaaaggttcccaggacagtggggggtccaaggtacaatcatcagaaatgctatcaggtttctcttcccagctagacttcttgatatatttgttttgatcttccccgtactttaaggtattgatgcaagtgtatttttttcctattgattgtttcattatatcctgccatggctacatagatttgattaacaaccctttcagttcatggttcttcattggtagataaacacattttcagtatatcaataagttcccaaggaattcactaggccagcagagagtttctttcatatatttggggaaataaacaaacaaaaaaggacacagcaagtttatagtcagaggccatatttcagcagctttctctctcctttggtaacatgtcaaaaatgcaggtgatttaaatttccttgcacatagaggaatgaagaagtttggaatttttatgcatgatcaggacctgtgtttgggaaaatgtaaactcatcacagtggaaaatgtgttgtttggagtctgggggtgaaaacaaagctgatggttttggagagattgccggagccagatggcctagtacttccccagtctggcgggccaactgctccctcctggataatatacagccatttgttcggggatatttacgctagagctgtttccatgtgaatgtttgaacagcattaaaaacgaacatattagtagagatgcatttattgaactcatatgactgtacagatagtctgttctctctgtcttatattgctgagagcgatgaaggagtgtttggacattggtgaattgtctacatagttgttgagcaagaatgatctggttttagtgagcaattaaaatacatcaatgtttggaatcagactaatggaaataatgttagcacctaccttgaagctccgttgtgagaattaaataacttcatacatgttaagaacttagaacagcgactggtacaaattaagtgcttaataaattagatgcttttattattattattattattattattaccccattgggttgacaaagccaattgtatttactaatgtaggtgtaaatgtagttaccataggagtgaaatatcttttatttgtgctagaaaaagaaatacaatatgggattgttagagtgatttagttttttatggtgtttgaataatataaggggttttagctctttgagacataaaagatgcattctaaagctaactgcttttggtacacattctctttttattcagggctgtgatgtaactgaacagcacactgaatctgatatcattccttcgcaactttcctaattcacttctgaaaacgggcctgcttagctgctgagctgaaattacatctttgtaatttgttcaccagtagccaagctgctaattgaagcaaaattatttttttattttattccactactaatgttggattgctgtttgacacgttgtttatgaaatgtcagatttgtagtgtttcctttggcatggtttaatttttaactagtgtgccttcacctactggaaatttctaagaccagattagctagcacctttttttttttctttcttttttttttaatgacaaacagtagaaattggtggttgaatgtaatgattattattatagtgtgttgatattgtaggtgtgcatatcattttttgattagctcaattcttggtaatttgctgccaaaggcttgttgacagtttgcattcagaagacatttcacttttggttacagcaggtactttgtgcattcatgaacttattctcttaggtgacaaagtaggtttggctttttattttgtaaggggaaaaaggagtaacatattttcaaggtacagttttgatttaaatagaaaattagaagtctttgttagttactgataacctttcttttccctccctccaatcctttcttcctaccttcctctctttttcttaatttcttttccttcctttcctttcttcctttttcttttcttttcttctttctttctttccttctttctttctttcttcttttcttttttctttttcctcttcctcttcttcaactaatgatgataagtttccttttgtttgcttataaatcaagaaaggttcctaatgaaaatattttgtttctaaaaatcctttggattttgctgaaccaaagtcaaaagtattctcttcaccgcctttattttgtcgtggaacacaaagagttaaaactattagaaaagtaaacacagaaaaaccatgttcaattctctgtatttcctttggcatcctattgaagtgtgatcccggtgtacattcactgtgtattttttcattttactgtgtggtctttacccatagtaagtttcaattaacttttaagacctagcagtatttaagaaaagctagaatgaactacgcttcacagtatgtctttcaaaacagtggcaactcaggcaggtttttgtatattgattgattggttgattttcaaagatattacaggttactttataattgagcgtttagaattgatgatattttattcataacagtgaaatttccagagatgtttttgcataagaatatgcaagtttaacaatttcgatgttttcttcttcttttagttaattattttaaatatcctttaaaagccccttaatctgaagtgaagagagtatcaaaaaataatatgagatattttctttctactcattagagtatgacagcagaaaaggtaggctagtatatcacaaaaataaatctgttccaaatatatccacttttgacagcttgtttgtcaatttcaccaggtttttaaagttgagatgaggttaatgttgtttactatttaactcttcctcttatacaagcattcctgtcaccttaagggatttatttgccattggcaggattaatttaaacattgttttctacttgatattgcatttttgattcttaggttacaaacctcaacttgattcactatcaattgatttacttaaataatatattttatatgatttttctccccctcccacccatctatatagcaggcatcccatcttcacttcagataaacacattgatttatttaaaccagtgttgtctttgtccctctcacaacagacaaccttcctcatagtgagcagactcatgatttactatggaggatgaaaataagccttcttcttggtgtttcattgtctgggccctaaaccagctgtctattaaaatggtttcacttaaaatagccaatgctgtttatatgcttctgtgatctcccagctgatccaaccccaaccagctttactcatacaccacagaggcacatatttaaattaggaagaaacgcagaaacttctcccgaagttggtgttagcaggatccctgtcctttggggcttaaagtctgggtttgctgaactgtggaccagtgttgatgtgtatgctaaatgtagatggtaaaattgatgtagggctatcagttgggtgtgcaagctgcagggagaactttagggcattttgaaaattcttattgttgccactctgcatcagagacattcatcaaaatgaatttattatatattcctatgctggatccaatcaggatgttgatttccgtgcccataccttctgtatgataggggtacatgtgtgtatgtgtgtttaacaatacttttcagtaacaaaaactgctttgatgaggttagaggtggatctgtctttgactgaattccactctagagctaacctcattacactgagtttttagtttactttagttacaggattttagtcctactccatggtggagtttcacttgcttttatttcagaagtcatggaggcagcacttctttctctgcctttatgtgctgaaaaatattgttctatagaggccccaaggagagggagagaagaaacttcatgcttgcactcctccctagagttcctaactatttctgagcaaatccaaactgatggtttcatttttctgtgcttgatttggagaaagattctgttttgactctgctgctggaagcatagtggcagtgtggtatttggtgaagagatgtatcatggaggcaaagggccttaaacaagtgatattcagtcaccaaagaagtgacacaggatttctggaagtctgtatcatctgctgtttgggaaaaccatgaatgtatttgtattgcagcattgcatccattgaatatcatcatgggcccactaatttcaatggaaccagcagtcttagtgaaactaatatttgcgtcatctagaaagaattgaaataaaaagatctgatgtaactgataattccccctgcctccaaaaaccaagcttttctatatatatgtgtgtgtgtatatatgtgtgtgtgtgtatatatatatgtatatatatgtgtgtatatatgtatatatgtgtgtgtatatatatgtatatatatgtgtatatatatgtgtgtatatatatatgtgtatatatatatgtgtgtgtatatatatatgtgtatatatatgtgtgtgtgtatatatatatgtgtatatatatatatgtgtgtgtgtatatatatatatattagggaaagccccatcagtatctgtgaatttatttaccagcttacttcttttagcttagcatgacaaatatattattttttaaagagtggtggaaccaaaacatcacaaatattaaagctgaaacagagattattacgagtatttagagaacatacaaaccatgtagtactaataggatttagaagaaatgcttcattagagttttttagcatcatgtatgagatctaataagtaatttactgtgttttttaaaatgttttcaggagtgattgcaggaaataaagcaggcagatgtaatttttggttttcaaaacatttttagttaatgcattttcttgagtaatgcaactgcttaggattttgaaaaggtcttttaagaatacagcaaagaataatcaatgcttgctgaaactagtggatgaaaatttgacacatagtaagatattaacacaatctggattacgtctacagaagatagttatgaattgcatagggtaaagtaataactttaccctggggaaacctggctcatgatctctgatagcaagcactaccttaaccaaatggtcagaatttatgttgccaatagtggaactagtcaacaacatgatttgatacactgagaagaactcaaaatcacctctgtgttatccctgccctgaagtatgtaactttaatccaagcctgaggaaacgcaggcaaacccaaattgagagatgttctacaaaataactggcttgtgttcttcaaaaatatcaatgtcatgaaatataaagactcagaaatgttccatattaaaggagacgtgataactggatgcagcattggattttcttttgctgtaaaggacattattgggtaactggtgaatctcagtagggtctgtagattaaattattgtatcaatgttaattttctgatttagataactgtactgtggttatgtaagagaattccttattttgaagacatacaggctgaagtatttagggcatgtctgcaatttacttaataaatgattcagaaaaaactacagagaaaagaataaagcaaatttaataaaatataaacattttagtcatctggtaaaatctggatgaagagtatcttggaattttttacatattcttgaaagctttttgtaggtgtacatgtatgtcaaagtaaaaaaatttttaaaatacaaggtattataggttagccataaaaagtggtttcgatgggccaatggtggagaagtattttttcctcatgcaagtacattttctcattttttattttactgcaatgttcattttgtaacgggatcagataccataaccacagttctctctgaggatctatacacactgggtcgcaagttatattcatcatttacaggttctgaaagtcccaggttcaaaaacaaagcacgttagagtcaactacaagttagtcttgtagcatctgtatgtactatataaagatatatatactatattaagatatatgtactatataaagatagtctctggctaatttaagtagttttgtcatcaagaaattgagggctataggaatgtgtgaaagtaattttgttaacaatttgaagccgtgtgatattagtattatgccgtgatacagtgttaaattagctaaatgtagcccactgcagagccctgctctgctaatagctgtgtgcattgctttggtccaggtattaacatgtagatccatgaaagctgaggtcccagggaatcttcttggtgtccttgagtaaaatgttcgttttacaaacacattacaaaaaatagaaaaaactatttgggctggtgaggtgatttgggactccagattttgagagtcagttgtaactcttcttagtttagggagataactttatggcttaaatccacacacagagcatatgccagcgagtattcctgtttgggtgggtgtgcaccctgtgagagcacatgttctcagcctgttgatgggaagagggattttccctgattgataaatcattgcaaacatgacacagttagtgaatggactccttagttcacctacacttgttttctactacccatccctggaagactaaatgttgagcctggaagtagtaaagtgaggaggcaaatacatatcatttaaaaatcaaatccaaatgcttttctgtattttcgctaaatagtatctcaatctgctaagccttctggggtttccctccttattgatgagatttatttgtattctatattaaaaggagaattgtggctgtcttgcccatctcatactctgatccagagatgtgcatcatggcaaggtggttgaaggggcagagaggaacatgcctttcaggttaatcccgaatatcataccttcagacgatcaacccagtgatgtctttggctcctcaaagctaatttggccttcagtagtggtgaagtggttaagaactcaattgtgattttttttttttttctgctactcctttccattcttagctaaaactgtgcttttgcttttaggccatagtgtatgaaggccaagacaagaacccagaaatgtgccgagtcttgctcacacatgagatcatgtgcaggtaagaaatatcttggtctctcccgttaattagcaaagagaagatgaatttgcatttcaaatcttggtgaactttggtctttttttttttttttggtacacatttgtcttgcttctatagacaatctaaaaagaactgttagatgtgagtatttggtagtaaagtgtcaggcatcacagtagttcttaattatttattagatttcatcccgaaagacatacatttccattttgatatcacactgttaatgggcacaaagcactgccttcccctactctcttaaaatcaaataaaacaatataacccttttagtgttaatatatgcgctcaactgcattgctagtaaaatgagtaagagttctattgatgtcagcagagtcttctgtttgggtaagacttgaaagttatagttcccctttctaattctcccacttgaaaatatgacgtccacacttaggcatcatttcttcttaaattgcatgtgggttttttttttcttcctcttgcatctcacctcttatttaccctatatataactctgacaatgtagccaatacttcgcagaggtagtgagcttttggaaggaaggcaaagatgagtccctaaaaggcataaaattcatgtgacccatagatgagtgtctttatttttgcctgtaatcagactgaagctacatttgaaaacaggcaagtagaccaaattaacttccatggcctcagccaggctttccacatgtgagggagtaggccagggaacagccctttaacttgcattcttattctgcataaagtaacaccagcagtttgctcccaatatattctgaataattggataaagcatgaagatgccactgtgcatcagagaaaggctactaattgctttgttaaccatgcaggctcttcctggcacaatgctggcctggctgctgactattactgaccaatccgtttagggcttcagctgctgcctcagcatggatgggctttatttgctgcttgtggacttgtgggggaaagcaaccttaaaactctacaggtggaaagaaaaagggcttaatgtgctttctgagtgaaatcccaaataccaacttcttgtatgtctacagttacgtatggatatacaattttcattttttcccttttaaaaatatttctaacatattattctaaaatatataggagtttcacaagttttcatttcagtgatttgtaaaacttgttaactattatgaaaataggttgtttttctctaattttaaaacagtagcagaacccccaaaatatggcaatagatttctttataagatattattaggcaaaaattaatgttatattgtacataacaattctacaataaagctgagttgcacctttcagaattgtgagtaaaattcattttagaaaatgttaaaacatgacctctttcttcttactatctttttgaccatatctctgttctggcttcttacaattagcatgtcattagaatgaattttccatgttgtactacatgtgattctagcaaaataggaaacagacaggaagatggatctcaaccaataggccaaataacatctatatatcatagatttgcatctcatatctgcacatgtttagactatgctagaaatcattctattcttgaaacatttaaagatatattatgcctttcacacacaggcctaccctctattaatgcagtttatatttttcttgtttttaaaattcactggtccaaagtactttattatgctggttggtgtgctttactgctgatgttctttctatttttcagaaacataaaaatagcaaaaataaaattctgaagccactgaaggcaaatgatgatgtttgtactgcgtggctaagagggaaaagccgtattcaaaatgtcatcctgctaatgttacagattacgggttttcctggctgcctatagatgtataaggggtactgtttgtttaccaggctgccatgaccctattacacaaacctgtcatctattgtgtggctaacagtcttttaaattgcaaatctgatgctctttagggggctttaggaaaaaaattctcactttccacaccatcctatttctcttgatttcttgcctgttttaagtggaagttgggatgtgctgaatttgcaccaggggtgcaaatgcaggctcaattataagcataaaattagagtctgttccccattaatcaggctggctaattgctatgcaccaccattagccatatggtgtgaaagacagcttgctctccccaagatgaaatttcttcattgcagacatgaaatagtgagggccctggattttaaaatagcttgtttcagatatttaatttctaaacaactttctgcagtgctttctatcaaagctaacggcacaataaaactttgtgttgatgtcatgaaagctgtatatttatagtatgttggctatggtgaaggagacacagagaatttagatcgacaagacaaggcttggtatgattctgttttgttgcaggcaaagggggaaaaaaaaagaaaaaatgagaaacaccagagaattgtgtctcaggtggttgcaaatttttaaaatccattgtgttctgtctgaaaggtgaccccactgcctgggctggataagggactggccaccattggatcatattataattattattaccactcagagacaaagcctctttgactggacatggagctctttctgtgaaattctgagagagtctctgcctgtttggtaaattggaatctatcatatcaatcatcattacattttgctatacctgttggctacgctcttaaaataatacggccccacacatgattttctaaagcacgattctagaagagatttgattaaagggcatcctgacatcctgtgtttaaatgtggatggaaaataagaactatgcttggtcagtgaacctagttcccagagctctgtttaagaaagacctctttccctcatcagtgtatggtttcttataggaccatgagttctcagggctcccttgagttcccttttcttcctttctctgttactggcttattctgattccatccttcagattcccacttaagcatggcttcttcagggaagcatccctggctctcagcctgagtcaagtcctattgttacgttgtcctgtaaacagtggtcctcttttatccatgaaggatgtgttgcgtgacccacagtggatgcctgaaactgcagatagtcctgaaccttacatacgctatatttttcctatacatgcatgcctatgataatgtttaatttataaattagacataataagagatgaacaacaattagtaataaaatagaacaaccatgaaaacaaactgtattaaaagctatgtggatgtgatctctctctccaaatattgtacagaataccagccctttgggaggccagggtgggaggattgtttgagcccaggagttcaagactgccctgggcaacatagtgagaccccccatctctataaaaactgaaagaaaaattagccaggcatggtgcatgcctgtattcccagctactcagggggctgaggtgggaggatcgcttgagcccaggagatccaggctgcagtgagccctgattgcaccactgcactccagcttgggtggcagaacgagaccccatctcaaaacaacaacaacaaaaaaatgtactggaccacaggtaactgaaaccatggaaagcaaaaccatggataagggggactactgtctgctgtgcttttctttcatagcactcagcacatttgtaactttttgcccacaatctgtcttcctttgctggactgattgctttttgaaggcaaggaagttactgggtgttcctctgtcttcagttttcgtatttctgaaatagaggataatattacttatctcagaagttggtgattaagattaaatgcaataatcaccacaaatgcttatcacagtgcctttacacacagtaagtactgaatatctactgttattattaatagtaagagtatttgtattaatagaagcagtaacagcaatatttgcagtgtggggctaagtacttggtgcgcagttgtttggtgtgaatgaggataaaagaactttgaatcaaagtgaaatgtctaccaaaacattcatgcactttgttcattctagttgtgggagttaaggatgttttcatttattcttttagcacctactatgtgcaaaacactcaaaaacggagagccagggaagactttgttctgtagtaggggagcttatggtgtggcctgggagatgatattggttggcagataacgagactgcactctagaaagggttgaatgtgatgagaggttgaggcaaagggctatgtctattcagagaagggaggaaatacttgtagttgggtagcaggaatagggagggggattttagagggtgcatgaagtgtttgggcacgtctgtttcagtccagccaaaatttctctgtggagagtcctgcaggtggatggtcctgagttctggatctggaaataaagttatggtcaaagataactgacttcagaggtcgtttcccaagggtgagagttgaagctatgggcttagatgggattgacaagggagggagaatagaaagagaaggcatggctatattcttggggggaataatcacgcttagcaagaaggcagggtgtgttagagagttcagaaaaagaagcttgagcatacagagcatagaaataaaaggaggaggtcaggtacggtggctcatgtctgtaatcccagcattatgggaggccgaggtgggcagatcacttgaggccaagagttcaagaccagtctggccaacatggtgaaaccccatctctaccaaaaaatacaaaaatcagctgggtgtggtggtgtgtgaacctgtggtccaagctactcgggaggctgaggcacgagaatcacttgaacccaggaggtggaggttgcagtgagcagagattgcgccactgcactccagcctgggtgacagagcgagactccacaccatctcaaaaaaaaaaaaaaaaaaaaaagataaaaggagggtgtttcaaagagggggagtcatataataagtgctagagagatccagatggacatgaaggctgagaaagcaccagacagtcactggtaaactttaagaggagattcaagtacatgctgagggcctggatgcccgtattatgtggttgaaatggcaagtagtgacagggactcttataagaaggatgtcggcagtgaagaaactaactcagagaaaagaaggagcatccttttaaaattttagacaatgggaaaacttgataatgtttgcaaactgaaggaaagaattaaccagggagggaagaatggcaaatgcaaaacagaagaggagtccttggtggggctggtcccaggtaaggcagaatgagacggacctgtgagctcaggtacttgagttagtgtgacgaggatggatcacttactttaagacatgggaggaagagagaggatagaagagcctattatgtaatggattctttaaaatcaagtcatctttataactattaataagactattcagataaatcatagatctcagtctctagccactttagggaaataggtaaggcatcttgttttttacaagtttgaaatgatgctttcctcctgttgagaaagacactattcataggaaaaagttccatgtccctaagatgaggatctgccgattccatgactgggaatatttaggtgtttcttgctctagtttatgaagctctagaaatacgccacctgtgttaggctggtaagaaagagactcataagttcgcttttctctggatgtgcagaattgtttgggagacacacaatcctgctgaggaaagggctgctgatttcggtccgtagtgtaggtaccacaccaggtgctggctaccaacgcctgagactggccacattgttctcatgtcactggggttgcaggttcggaagggatgtaaacagtggcctgcttttaaaatcttaccctggcagcaaagcaaattaggaaactccaagccttgcaagatgccagcatgagagagcaaatcccaagtctgtgcctggtacagtgcccaacacacatcgtaggagcctaaaaaatagtgctttgaacggatgaaggtccatcagtcacacagtaatgaggacctaattatcattgtgatttcttttattaacactgtcactttttccgttaagtgcttttgcatctgtttcatctacggaattgtttcagtatgagccctcttctgccttaaacataagtgaattcattctcctttcagcttttccttcctggtttcctcctgtgtatagtggaggttggtgctcactcttggtccttctgagcttagcagaaagaactatgggcagttctacctgaaaagggagaactcacatgggcaggaaagagcattgtggcaacaaaggagaggtcctcactctgctcggctctaggaagccacagggggcttgatatcagctcagtctacaagaagtctttccttccactgcttgtggttgatttttaatttttaatgtaaaagcatattgccatataaagcagaacactagcctgggcgtggtggcttgcacctgtaatcccagcactttgggaggtcgagctgggtggattgcttgagccagggaatttgagaccagcctgggcaacatggtgagactcagtctccacaaaaaatacacaaaattagccgggcgtgttggcatctgcctgtagtcccaactacttaagggcctgaggtgggaggatcgcttgagccccaggaggtcgaggcagctgtgagctgagctgagatcacaccactgcactccagcctgggagtgcaaaaaaaaaaaaaaaaaaaaaagcaaaccactgcaaaaatataaaaataaaatgcacgtcttccattcttccccactgcctgttccactctctataggttaactctttgaagttcctacatttaaaaaatatttcctgatggcatactgtgtgccaggctcagttctagttgctggggtctatgactgtctttgtggggcttatattcaggtgagagagacaataaaagacaaatgaatataaaatacaacatggtgagtactatgaagaaaagttaagcagaataaggagctagagtgctctagggcagtcatttctttcttttttctttttgagacggagttttgctcttgtcacccaggctggaatggcacgatatcaggtcactgtaacctccgtttcccgggttcaaccgattctcctgcctcagcctcctgagtagctgggatcacaggcacccaccaccacacccagataatttttttaaaaatttttattagagatggggtttcaccgtgttggccaggctagtcccgaactcctgacctcaggtgatctacccaccttggcctcccaaagtgctgggattataggtgtaatccaccatgcccagaggggaaggcatttctaaagccgttgacattatgcagagacttgaatgaagtgagggagtgaaccatacttgtaaaaactgtctcttcccctccctctctccctttcactctttcatgctttcatttttctcccagaaatggggccatactttgaatagtattctgcaacttggttttctcaagtcacaatatgctgtacatttctttccattccagtgcttctaactctaccttcattctttttaatgctgcacagaattccatatacacatgtatgtgtacacacacatccatatatgtacactcatatgtatgtatgtacacacatatgtatgtgtgtgtgtatatatatatttaacagaatcatactgtagacattattttgtagcagacattattttgaggtgcagaacagaagccggagtagctcatttcaggaataatgactatgtgatgcagtgatatgacccaagaaacaggagacatgttgggcttatttttcatacttggcctaaagttttttttgtaagtggtgagtgaactccagccctttattcttttttctctacttttcttcattctccccatttcatttctatatttccttctacacttctgctctttgcatctgcctatttccctgggtcccttagaaaggaatgcttcaattcatctggctgctctcagggacatttttatttttagatgacgaccgtgcttaagtgaaaaggaaaaatctcaggcctggtgtggcatgcttgggggaggtggtttgttctacgggttgggatgaggtgcaccttccttccatcaacaatgccttggatttatctgtcacccttttattcttccggattgtatttgccccccaatacataacattcattcataaaattattcatttattcaatcaattaatatttgagcttttctattctaccccaggccttatgccactcattaggtaagtaaaattgatagtttcttcctctacgaagtctatgagttaaaggaagagaagaataagaagagggagaaagacagtaacaaaaaatacacacacatatatgtaaaaatataatttgcattgagttaagtgccttaaaaggaaaaaaaaaaacaggaaaaacctaatttagattaaaggtggggtgtcaggccaaacctctctggggaaggagctataggctgagctctgagggtgagaaaagattggctaactagggaagggttggaggagaggcccgccaggcaagagtcggccagggtctgggcctgaggtcagattgaacagggcacaactgagagggattgaaatgggccagtgcggtaggagcttggcaagttggaggaagggggcagaaggttgggaggtggtctggtatcatgtcatgtcatggatttgttctaagtgcagtgggaagccattaaaaagtcttgggcagtgagatggcacagtaccactgacatttggaaaagctcactctggctattgcagggggtcagagtggagacagaaaagtaggcagccactgcagagtccaaggacttggatggagatggtgtagtgggggaggagaaaatcagataggctttaaaaacagacccttgtgcatggttatcagcaagcaggttggaggagttcctggaggacatttctcccaggcaggtctgtgggcagcttgcattgcctacttgctgttttgaaaaggaaaatgaaggagaaataggttttctcaaccggcagttttcctccatgggtaaaggagacgtgggctctgtcgatgggctgcttttggagacctgctgcttctgcagagcacagggcagatttgcctggacttgaaggaggaagggactgaagagggtaggtgcagggggtgataatgatgcttcattgtggctttagtgaggctagtcatgaagccaagtctttatacccttattgcctcaagcctgttccctggcatttagaggtagatactgcaattgctccattttacagatgaggaaactgagatcctgtgaggtggattaccttgctcaagttgagataggcagctctgtcagatttcagaaccagtgttcttaaccactatactattctgagaagcccatgaaatgtaggtataggggatcagagttcagggatgaaggagttatatttttatgtattttctggcatgcatttcaactgcttgtactttccactgcttcaactacttgttactttatctgtctcttagatatcatgatactttggtttttccatcccaaaagtagcagtatatagcagaactcaggcctggaggaaatagttccctctgaatcagaaggtgaaaggctataaggtagacagagtggttttagccgaggctttgacaaaggagatacagttcttactcttactctccgaagacatgaaagaaaaacagaagacacttaagagtggagactaattctcttctcagaggcatagttatggcaagaaaagagactttccaattttggtgaaggactccctacgcaggagtatatttctgggtcctgaagatgaagttcaatatttggttctctccagcagccctctaaatttaggctgtatgattcactaagttgtaagtgtgcgcgtatgtgtgtatctctctctgtgtacacgtgtgtgtgtaagagcaagaagtgcatatttgcttgtggtgcttggtgaaatgtaagttttggaggacctccctccccatctacttcactgcttttataagtatgcccctggtgcagatcttgtttttatttgcaaacaagtttcagatggatcgttttctgttgaccattgtacttttcaaaaacataaaatgttcaccctttagaaggcatctcagtttttaaaaaactggcagccacaactggcaggggagattttagtaataggtacttttcgagcccataggctcttccttctctaacataaagagcgtcctctcacagagctgtgctaacctttacttccaatgtccataatgcccccagaaaacttaagtgagggtcagaacaggcttttatagccagaggaatgtgaatctccactttcttttatcttgccccttccttgtcttaattattgtgttttacctttattctcatgaaaatggttcaaaagcaaacctagctgtaggatttttggaaaggctgtggttgaaggaaatgctacccataaaggagaaaagagaagaaaaaggaatccatttaatacaaaatgactggagggggagaaatcactcatacctcattattgatgcgttccacacaattagtgtgatcttgagggaagaacgtttgagccacccacaaccttgaatattctcattgggtagatgcaataacagtgcacttcacagtgaactctgccagcaccgcgggcagtcatggggagaccccatcttggggttctgagtcttggctctgggagagcccctctcccccacctccttctttgagcagggagaggttaagcctggccattaacccataggtgacccaaatagaattatctgtcccagggatccgttgattgccaggtatggctttgtggtaattctagcatttgcaacccagcaatttgagccttctgtctgcctaaatgatgattttacattgtaatggttgtactaaatcctttcgcttttgctccatagccgctgttgtgacaagaaaagctgtggcaaccgaaatgagactccctcagatccagtgataattgacaggtagggaccactcttctttcactggattcttattcctcattataatgaaacacctgcccttgtgttgctcatgggcgagggttaggaatgcatgtggctgaaatttgcctgttggtcatgacttacgctgtgctgagcgattttgattcctgggaaagccatatggaatgttcttttagaggcctgttccttggattgctccggtttttgtctgattcatgctcctaaaggaatatattttttctttcctgactttctgtggctcaatcctcatgctgtgccaggaagcttcagaaataaaataataatagtttgtgatttatgaaatgtggttgggtgcttataaatatttaacttttatttgaaaaatgtttgaatcattatcacttttagctacagtagttctgttggacgtaatccatctacactttaaggttttatttatgcataaaagcagtttaaagagatctgtgaaccaagattttctactgttatttgccggatttgattgcagtatgagaccatattgtaagttgattaatttatcctgcttgtcttaatttttgtgtttttaaacagatccatattactaatctgacatgaccaagtaaatcaccgtagaacaataaatctgttttagttgttcggtgtaattttgagtcagtgtgcacgcattatgcaaagtcgcattccaaatattcattttacattttaattattgaaattcattgtatggaaacatgtatgataaaccatttgttacatagcattactcattgagagttaaatggcctggaaggtttatagatactgtcaattgtcagctaggaaaagagctagcatcttgtactagctggaaaaagagtcttgccaataagactgaccgatccctcattgaggaaaccaatggttgaacacaagtccctttttgggtttcagcaatattgatttttgacaacaacaacaaaagaaaaaaaaacccatctttctttctaccttttttgggcttgttttatcatttttcagttaacaatgacaacaacaaaaaacaagatgtttacttcgcttcaacataatttatgccaaaagatcgattgttgattttgacttatgtgagtcttcaggcataaacccaattgattgccaagaagctttataaaggttacatttcaatcagatattttaactaaatattcctcactagtattcactaaaatatatatatttttgctccatataagagtattagtatatttgattcaaagttaaaagatgagaaagtttgacatatggtgatgtgtgtgctacctatagaattaggataacatgtttatctacaaaagcagatatactgttcatatagttgctttttctgtgattgaacataagtctccaaatgaataaggtcacaagtaaatttaacctttatgctggtttgttttatttaaatttacctctccaaaatatcatttgttattttaagcatttttcttcctcctctgttgaaaagaaagtgtacggatcaaaggaccagcccaaatagtccccaaaactttgaaactataagcattttgttctgccatgtagttccttttggtttagatgatgacaagaaccttaccttgccaccctcaatgaaaagacttttttttttttttcgcttgtgaatgggttaagcttttaagttcttcgtttggtttgaagctgtgactctgatatagaaggttgatatgactgtggtttgaataacatttgattttgacctgttcctgtgggttgcgatggcataagaaacttgactcagcagcactgtaattagcccggcccctgtttttgaaacaggattgtgttacctggattgcattagtgtggcttctattgttgccgctttgcatctgtcccagaagggtacttaaaaccttttcttggctggggtagttcaaacaatttaggcaaaataagtatgcactttatgctgttggtggctttggggatattactcatgacatttatccttttcattttttttcccttttggtttgacaaagtagaaaacagtgtgtagccaatcttggtctcttcagataggagtactttaaaaacagctgaaactcagtgtatgtgcacaagccccacagcatatgtttattcgctggctgttgccattgtttctgatgaactatcttttcatgcagtgatgccagttgatatgcaaaaccccatttagctatttttatttgcacctgagttttcagaatttatttgtccttcaggctgccaaaggttttaaaagctccagtcctgtctgtgctgatatgtgaaactcccattcttaacagcgagagaagagaataacaacaagagaagaacttatgcaagaaagggcaaaatagaaaagatttttcaattccataaaattgctgcaaaggggaaaaaatgatggcaaccgtgtttgaatttcatagtttccaatttgattctatattactgattgcataatatctgtgttacgtgcttagggtttgatttgctttcagatttatggatgcaaatccctgaatattttgtgaaaataggctatgaggcctgcattcagtagcaatagtaactgttttcaaaagatgcatacaatatgcaattacagagctgagggtacaggccatccttgcgttaggatttagcatagttttaacacgcagtcaacttttgagcaccaataatttttagctctctttgcttgtccttcggaatttgggagaacactactatttttatcagtcaaaagacttttagcagtggtttattcaggaaaactatttatagggtagagagaagagactttctggtcatagtgcaatcgtgcagggcaagctatttctgtgttaaattttggctgtattatttgctgccactgactttgggacatcagcctggcatattctatcaaaaaagtagaattaacaaaatcagcagttgcaaactgtgatttagaaaaggggcttctattatacttcatccttatggcatgcacagactgagaaacatatgaccccaattctttttacaatcatgacaatttgtcaagtcacttcaaaaaagtttatagaaaaattgctgtaaatgcaggaagtgcacatctggagttgaatgccaggttacatttctgtgtggtgccaaatagcttgattaagaagcacataacccagcctgcactcagtgatccagatatttgagctgcatagacatgggaaaagtcaaatgtgttatgtttaatagcaaataaccaggaactgataacagcagatttcattatttttgaggtaaagggctatgtgtggtaattattgttaaagtaaaaagcaaaaaatgacttccagttattgaattaaggtggagattgattttacatattgacacagtaactaatatttgaatttaaaaggtttgcaataaacttcatgtttagaaattgaataaataggagttttattaccacattggatatccttgtgtcctaacctttttccttggagttatcttagttcaataaataaaacctcattagactattcccatttcaacgagtttattaaattttgcaggagtaattagcataagctgtgctaatttttctggaagactaatgagggaggttcttaattaggtttactttgtaagaatcagaaaagatgataatgacaaaagtcacatagggtagtctgaattgggaacccagtttttctgcatctattaaaaaatctttctatatggaaactttttaataaatgtcggaactgaatatattaagtatgcagactgttattccatatctggttaggatgaccattcattcttaatttgcttccccaaactctttattttcctaaactatctttgagcaatgacatggatgaatacagatggtcttataaaaacatttctttctccaaagtatgctggaggcttcttttcacacagactcctgaagtttctggctagatttctgttgcttatttgcagtggggtgggatagggggcagcttaatgtttgtttgtttgtttgtttgtttgaatttagaattagtgcaattgatgaaatgaaccattaagtaagggtgacaatgtgagcatcattccttgtgcaatgaatccttatctgttaacaagtggattttttttttagtagatagaaatactaaaggatgaaattccatctcaaattatgttctcctattggtgtgaatttagacctagttttttaaggatataatgtagctccagtaacctaaaagttttgggttcctcaaagccgatatttaaaacttggatgttaaaagcttgtcaacttatgtacctgtaagaattttgagtttgtttattgtaatattaacagaattaccatgcctttttcccccatttttaagaattcctgtatctatgtgtatggctatgggatgtaggccttgacatgtgacataaaaaaaatacacaaattttgtaaaatgaaaaacctagtctgtttggaattacttcgggtcacacttacgcaagggtctcctataaaggaaaaaaatgcctgtatttcttttttccagatttgtctaaagatcttccacatctagatcacttccatttaggtaacacgaattgggtttgttttatgattatctgaaatagaatgttcagtaatgaaaatattagaatgcccatttgcctgttgattttatatgatgtacatcatatgaacggaaaagcttaaccatgttatggttgctcagataaacaagtttattgaagactcattctttttctaagaggtgtaaattctgtggtaagacttttcagaaaagtgcagtgttgccttatcaccaagctaattttcttcattaaattgacaccaatgtatttatataacatatatgcccatatgtataataggaaaacaatataaaaactttagagttaggagagatctatctatctaaccatccatccatccatccatccatccatccatccatccacccacccacatactttttaccattgggtcgggtgtggtatgtatttgccaaggattgtaaaggcatctgggcctttcaacaatcaatggctttcctctgtcttttataatcagaggtaaattccaatatttatttattttttgtcatccacataaagtcctcaattaacatgaacataaatatataattttattaaagttgcaaatgaggcttttagttagtttcatgatttcatttcaatgccctttcaactcttcttattttggtcttcatccagtttttagaaggaccaaccaccaccaatgcataatcattctgcactatacacaaatggctgtgtggggtatgaagaaccagaggtgtaaatgcatttctcagcgttccgataaaccttttataccacctgatttgtaaccttgactgcttggttaaaataaaaggaggaggaattcactctctaaaattgccctaggcaggataattattgtgtttttggttggtttgagaggtttgcattttttcaaaagtgaaaagccagcattgacactgagcatgaatttaagactgtttattaaccttagtgtgtttaaacatttgtcttctcagtgggaattcatatgtgattattagcgatgagacttatgtgaatgagtatcattctaaattttatcacatatcagataataccattctgaatatgagatgagccccgtacatttgtgtgcagtttgctaccgtgataagaaaataactaatacaataagctaatcgcagtctatattccatttgctatcagctattcccaaatacacaaccaggatgcattaaaatgcatttcgaatacgctgacaatgtatcataatgcaaagtacttttacatggtataatactattgcagacactgtataatgaacaacagtggttttcctgtaaaggaaataatggcagcaacttccaagaaatgtatttaacggagcttcagagaatcagtagtgtgtatgtgtagcatggcccgggtatcagcccgtggtgtaggtttttaatcccatgtcatcataactttgcttttgtaacagttctggaaaaatacagaaaagcagtacgaagtcctctgtgtgtcccattagtaactatgcacaatcattttgtaatgagaatatatgagtatattaaacatgcttttactttcctaaaagaagttgcttagaatggggggaaaaactctctccaagtgtaactctccattgataaattcccctcatttcctcatttccctctcctgccagcacccggttaactctctaataaaaattgaccagatttaaaaaactccatttagtggttcctgcgtaaagagatggtattttggtcactttaatttgcatgagatgttatctgaaatcgaccactaattcttccttctcacagccccccatcccattcctctctttacaaaccgcgtaactacatactatccaggacaatataaaagtgacctcaatactcctattgcaatcaatgaaatatggtgaacagtacaggtttgtctttcattgctccctgccttgaaaggtgtgggtagaggaagaaaaatctcccttacaaactatttctccagttacaagtctttgtccagaagcaaaagaaggttttaacgttacagtacttattctaatagaattttaattgccctaatcctgctaaagtgtgaagctgagtgtgtgtgtgtgtgtgtgtgtgtctgtgcatgtattcctaatagggaggggagtcatgcaaaaaaaaaaaatctttgttacatttttcatgggtggggcagggggtgtcacatatgttaaatgatgcaaacttaattaaactgattctggggaaggacaggccattggcgttccatctatgaaatgtgtactccactttcggtgggaacagagtggtcttctgtgtgctttgggaatttctatttttgaaagtgaagtgcttggttccagttgcaaacatgccctaaaccctacttgtcatgactgagctagacatgctggcaaattatatagattgatcctacacaataacctccaaaatggcacttggtaactataccatcctgctaactgtttgaggcacaatagttttgtaatataatataaagtaatggtgttagccaacacatctttaataagatattgttcgtgcctttgccatatgctacagagcagcctctcactcggtgggccttttgattcctctcaataagattatttcaaatactctaatcctgaatcattgacatgaatacaaaagcctagtgacatctaatagatgcctcttagctttgcttttcctcttgttcctttcctttttcttctctttttacctgacaaaaagctcatagacacttgggctctgtctctcagtagcagcatggggggctcctcatgaaatataaagggggaaaaaggactgacagaggcccgataagctacagagtgaagggccatagattaaaagtaaatgccagtaaatcctaccctgtacactcacttgttcttttattgttttctttaacactttcagagccagggcagggaaaaaaccagaaaatagtaatcaagctgcccatgtacatttttaatctggacactgtcactattatacatattttatggggctttggcgacattctcaaattttggttcatgtaaaggttgtggtgggttttttttttaatgtccttttaatcaatatcaagaatccctcaagaacttttttgctcatttgctgctcaattaacttaatattgataccatgtgtgggtaggaagagcccttctgtagggtgtgaacactggggctcaggacatgacatcttcaaggctgaaataactttttttcttttcttttttaattgatgaattgaaaattatcaaagtaaaatgatagggtattttgtttcatgacatcagctgctgctttttgatgtggtgctgctccccgccagtgccgtgaattctccgcctttgccgggtggtgcacgcgacttagactctgctggtgcatgccgaggagtcaggagcccagctgggtaacttttctaatggtcaaaaggttgttccctcctccaccttcctgaagcaaccatgatttgactaaagctctttattactccacctgaatatcagacagtcatgctgcttgcaatttatttattgttttccagaggtaaactactgagattttccccacctgtttttaatgtgcttctcgttcataagtattctgatctgttagtaatatctgaaaatatcacttttaacactcttgggtgcactattggctgaagccccctcacagaatggaaagttaatttgaagaactatggacctgcatcaggtttagctacacacaccacacacatacgcacatacacacacgcacatactctacagagaccaaaaaaaaaaaaaaaaaaaaaaaaagatgaaaagagagcagtctctttttcattttttaaaaagttctttagaaaagaaagttggttaagggttcacctggttatctttgaagctgttaccaacagttgaaaacccatgtttctctacacagtcttgttgttttcctaaagccagattctaatgttagatatatgggatatgtctcagaatatggttttaaacactgagttgttcttcctgtagctgtagaaatgggagtgccctgatctggctcgtgaagaccagcatctgaatcctggtctatgagcaccttaaaacaaagcaagcaaaacccctgatcactgtgagtttaatagtagcttacacctaaatggcacttccagcgttttagagcacgtcggggtataccatctcagaaaattctctttgcacaaattgactccatttgacagatctgtaaactgaggcacacagcctaaggaactatccactttattggtgacaaagcaagtgattagaaactccacatctcctatctcccagactgatttttttcccttttctcaattgctcagctaaaaacactgttttcagtatttcataatgtctcttttatttcatttttcttgctatccacagcacattttcatgtattactctaaacctatttaccaagccagctttcttagttgatgtcacaattaactttcaggattttatatgtatatatacacacacatatatataaacacatatatatacacacacatatatgcatatatacatatgtgacactgtttattgtactcattgctggagcaatgtttgagttcttatgtcctcatttaatttgattgtgtatttgcttgaaaaaaacatcagtaatccatacagaaatctgggagaaggcacagtatgatggcaaaggcatagattttggagtgcattggctaagggatccagttcctccacagctacttattagtagctgagcctcagggggctcagttttctcatcttcaaaatgggaaaagtcacttctattttgaagcgttgtgaggattgaaacacctagcactgggcttggcacataacaggtgcttaaaatcaggtagctcttgcaatttgagcatcgtatattccatgtggattttcattcttaatgtgatcattgccatgggacttcctttgagcacaattaccttactgaagttaatcatggtagctaagtctccttagataaagactcattcattgttttgtttccacaaatatttattaagcctctattatatgtcatgcactgttttcagggttgggggtataacagtgaaaaagacaaacatagttcctggcttcatgcagctttctcagtgtctcagggttgatctctgcccccagtcccccaaaaatagttggaatagtaatagcaagtataaacaaagaatatattgatatatatgttttaaaaatagaagaatgccattttacactgggatcatgatgcagaagaaaaatatccccgggttaaagtcaccttttagctcatacccagaggtatcgaacttgggcaaattccacggctttattgcactcttctgaggcagtctacatgttggttaagactgaaggaagagatctctaagaccctttccaactatggaattctaattttagctgtttgtggtattgctgagcacaggcaggtagatgagcgctttggagggtaggttgtaagcctaagagggcagtgactacgttgagcacagtgcctccctcctgtgtactagatgcttagggcttgtttttgtgaaaagaaggaatgacaggaactagaaatgcagttgttgaatctggtggtctcatctctctgtctaaagacaagcttgttataactacacaataaagtgaaatggcactgccattaaagaatgatgaggaacagaaaatgtaagataaaatattaaatttgttacacttaaaaatgttaatcttcacacgattaccatgcaaatctcctcattgcctaactgtttaattgatcaagtaaatcacagagcagacaagtgaaaatctctgctgttgacattctcacaaagcatattttcaagaatatattctattaactatgtgtattacacatgataatgggaatttcttattttgtaaaaacatatatatgtggcatcctttgcaaaccaccagatttcagagagtttgggagaaggcttgatttttgcagggcaaaaattcagccatcctctattatgtcaaacgcgaaatcagtgttagaaagacccctgtgcaagcagcgcctttgttttatatactattagaagacttcagaattcaccagtttttctttcaggcaggtatagcattgacctgatactctggagattgaagggttaatgaattctctttccctccctccccctccccaatcttcctgtcccccacccccaatcccatcatgtgcctggttgactctgaaagaaggggcttgaagttacccacagggcatccctttccccagccttctccaaggccacctgggcagacgggagcttgccttctgtccttaggacacaaaatccaatcaggcgcctggcctgctagtctctctgacctgcgagctgggaagagggaggagaagcagaggccctcacatttgataggctgcatctttgtggctttagggggctcctgtgtctactcgaggaaggaagttctcccttattttaagataaggtgtcattcatgagagcaatgtgctgaactaatcaggttaattgagaggccgtgagtcgtcctcattgagcccatctcttcttcctgttaaaggcagatagcgcagacagacagattacacatattttagttttttcccaaaagcttatgaaataatgtaggcaggcagggaacgtaggttcagctgaatgtcattcaggctatttgaacatggattcttattgtagaacaatgtagcattcaaaaaataataaaagaataagctctcctcaagattgaaagatgagtgtctctgaatgtctgatacactcttttttttcttaatattatattaaactaacctcagcatttcagatcaactaggaaagaatgtttgttgaagagtccagttagattcctccgcggctattttatttaggattgaaacgtaaaaaaaaaaaaaacaaaacaatctcattgtgatgtgtcatcagtgacaagtagcttcttgagccatgtttcgattcttcggcttccgagccggacactgggggccgtcgccctgactaatcgcatctcggacctccctctggagcagccgagtggggaagaaaacagagctgtttcaactgaattccataaagggcgggggctcctcctccctcttctccactcaaaatgatttgtcatagtttaattttaaacactatcattgactattctttctttctaccccacctctttccacctttttttttttcttggaagttccaggaatgactttaattatctccacaatcaaattctcgttgctgcctctgtgaaagtgtgcagtcatagatggcagggattattttctttagcacttggggatacagaaaccggttgtttcaaaatgagaaccagctggttccacagagcccttatttaatggggagccactttgtacacaaagcctttgctcaggtcagtcattatggcaaaccccaaatcagcagtgttttgtctatcaccctgtattaaatgtcgagcgaggagtgatttagcagatatgataataataataataataattaagaaatacccagcacaccctgcatctttaattttgcctcaactaaacactccggtttggaaggaacatttctcaaacttcttcctacagtgattacaatcatagacctagtttaccactgctctctcatagatggctgaggggtatgtgtgtgtgtgtgtgtgtgtgtgtgtgtgtgtgtgtgtatgtagctttaaccctctctaaatctagaaaataaaattaagctcatctttcaacataatcttttatctgacaagcacagtagatagatgaaaggtagatagccaagttgtgggtccccttaatagaaccaattggagggcagagataactgctattatcaaacatcttttatgccatcctgtaaaataaggacgagggtgatataccatatatattttgctgtctttctagcttgtagaaattggtttgttgtcataccctgttaatctctaacagcactaaattcaatttgaaatgaggagagtactttcactatttgactgtacaaaatacttttgaagcatgcaaaaagaaaaaaaaaggataaaagacacgtaaaaccacaatagatattcggttatgagaatagtttgtttttagaacctaggttgcatttttctaaggtgaatagttttggaggatgcagtatttattcaatcaggaattgaagaattaaaaaatagcaactttacatagatttttaaaaatctagtttaaccaaattttatctttcaaatatgagaaattattttgcattactaataagaatatgtggcttttaaaaattatgacatgctttttttacattgatagcaacacaacaaaatactttgaagaaaggataacgatttaaaaatttattctcacagggagtttcattaagctgagcactggtatatatgtttttaattatttttatttttaggatttccatattgaagtatggtttgggtaaaatcttatcaaattattttgtttgtttactaagtactttgattgtataatgtctctagttcaaactgtaattctattttatattttctgtatttgtatttttaaaaaattctgttgattttttaatataaaaaacaaatgactgttatatttctagtcactcaaatttgaactgaattttacttcctgtttcaaaggtcaaggcaggctgacctcaacagcagtgtggaggctgctgaattattcatatcattgactttgtgtcagcttccacatttgtggagagggatgttttattcatttatctcatttagggttcttctctgcacctgtttctaccattaagtaccctgtaatttgcatttgatgctaatttagtttcatatcagcctggtccccccttgttaatttaattttctaagacccttttcattacagtagaactgttttcctctttaaagcaaacatctatacaagtaattgtataaactgccttttaaataatatcttttagaagattccatcgtttaattccttaattcctataattagccatggtttgattaatgtttcaaagggttaaattaaaatgcagaattactcaaatgcatactggaataatttcttatatacagcagagttagcgttgtggtgttcttcctgagaattctcagacagtatgtcttaacagcagtcattttctttatttagagtgctgtttagtttactaatagtgattctttcaaaatcactgtgcactcaacattactcgtgaaatgttagttttttttttttcatcaaattgttgatagacagtggcttaaaaatgtttctgcaacattgataatgacatacccaaaataatcagggcagaattaggtccaattccttgatctatcctggaagtttggtataatgaatttcaggaaactctgttatattatatgtctgtttctcttcttaccagctcttttatttctgtctgctgctcagggtagattgcctggaaatttgtcagctttccagacatggttttagccagctttggtttgtatctacggacacccgttgggctacagttgccacctacatattgtagaaattaggagtaagttgtttgaggaggcctgattgaaatggtggctacatggcagaagtggccatgtccctggaatgtctgtcaaggatttgggggttatgagaacatgctactcatataaaccaggtccatagcccctctgactgttcagaaaagaattctagctcagtccttttcttggaactgtttggagggtgtttgacatgaatggccttatggaatctgttggtagtgggaattcaaaacaagggtatgaattacgaattcaagcactaagatacgtgaaaattaaacagaagggaagtggctgcagctgaatattactaagaaattagcccaaactctacagatccttcttccactaggttggattagtttgatctgttgttcatattctctgggaaaaccaaatgaggcagttcctttgggtttccggaaagatctcaggtctattggaactggagtttgaaggtggcttttccttttctttcagttataaatgattcctggggactcccacacacaactttgtcattgtggaaatgtgaaagggtatctccagattttctagcagacagcttcatttgtctggttgcaaggtagggctgggggtggactggacaattccccagggtccccttcagctgagaacttccctggacctaccagtgactttttcacgtcctacagcttattaagctagctctgtgcttctgctgatggtcctaaagcaaagtgagagctttcaggaatgaaatacaggatctttattcattaacaaaacattttcttactcattctccctcctacatccccctcctccaggtttagatattctttttagtttggacaagtctgtaagctccaatagaaaagcctccttgaggtctgattaaacggctgggtttaaaaacaataaagactatctgcagagctcatgagaatgcaggaaaggttttcccacccaattctggctgatgcttggaattccactgtcagaatctcatccctttagctaagaaccttcaatgtataccaagacatacaaaacttagggaaggctagcactttaattctatcattcacatacctcttcgagggaatgacataaagatctcacatgggttcagctctttttagttttcatgacaacacagtgaggtaagcaggatttttttgtatcatttcacaaatatggagaatgaatagcttaagaacgctaatacatagcctagctagatcccaaaggcaggttttccaaaaaatctagattcctgtaggaagagaccacgattccatttaagctgagtggactctcagagattacagttcagccccttcattttaaagatgagaaagctgaggccaagagaagcacagcaatgttgcccaaagacctaattagtctcagagccaggaccataagccaagtccctggctctggttccagtggcttttctactactactctgggccatctgggtcctgctctgctctccatttcaccttgtgtgcaatcagccttagggaagggtacaacgtgtcttttctgggtttgggtccaaggaagcccctaagtcctgtatctctaacaaggcctagcattgtgcacggagcacaagttaaattgtttctcagaaattataacagtccgtcaggcgcggtggctcatgcttagtaatcccagcacttttggaggctgaggcaggtggatcacctgagattaggagttcgagaccagcctggccaaaatggcaaaacctcgtctctactaaaaatacaaaaatgagcttggtatgatggcacatgcctgtaatctcagctactcaggaggctgaggcaggagaatcacttgaacccaggaggcggaggttgcagtgagccaagatggtgccattgcacttcagcctgggtgacagagtgagactccatctcaaaaaaaaaaaaaaaaaaaagaaaagaaaagaaaagaaagaaattataacagtcacagggaggaggaagctacagaatatcccatcataaaatattactttatttttaaaagcccacatatttcatttatttgcaactgtgcttgttcatactatgtcatataacaccgtgcgacaaattgcaatttttgtttttgtttgccagaggtatttcatcaatagtcatctttcagtaggaattttacaaaaggtctttctattccagatgtcttaccatgagcagttgtctctgactattatctttctctggaaggtactgacatacataaatattgacgttggcaattttcaaagtaagtcttaataaaatttttcttttatttaaacctaaacaaattgaaagtaccctttccaaaaataataataaaggaagtgaggcattgttgcagaatataattctgaaaaaattgtagtgaaaggggaaaaaagtacactgtatttcttcctactcaaaccacttttgtgtacagttttgcctaagcccgaagaggtttgtcacacatttggaattgccaaggaagggcagaagtcatgggtatggtgctgagagaaattattagcccctggcatagtctcatgctgaactgcaggagaatgattccagaaggcaaaggggcattcattcgcctggtaagctagagggagaggtggggagttggcagcttctgtactgtttcagagtatggggcaaaggaggaagtgacaattatttcacctctgaattatttgactatctggtctggctgaaaagattgtgctgatttggaaaaatttaattttttccgtctccacagaaatatatgactgaatgtagtcaaccaactaaatctttcttcccagtatcaatccactaaaattaattttaaaaggtggaattttgaatttatgtatactcttttcttctctttttctcttcccaaattgtcataaatcattcaacaggctggattcctttctgctcccaaatagtttgataccagaagccagaaaggataatcatgctaaacctattaaaaaatggtttcatgtagggttagtctctcctttagaaaccattgtttacattcacagaggtggtgaggacaagcagctgttgagttcattgacctcagacaggagaaacaaaggacccagcatgttaatttattcaataaatgttcgtgaagcatctactatataaaataagttgtacccccaatcccagattggggactgccccagaagcactttgtggtcctcccagggcactcacctattaaggaaattggatttggtgtagaatctctttctcttttccaaatcaccaccaaatccattgccattcatctttctcctgccattacctggccattcccagggtaaggtcccacctccaaaaagagatttaaagtaattcactactcatcagatttagtgtaggttaattccctactatgctaataattttcatcttcaaggtactaatagttctaatatgaacccaaatttgtgcatattcttctgttaaggagaaagcatgctttggttctgttaaaggctcgacacattaaattgctcattctgatatgggacttctcattcattatgaaatgagaaggaacctcatgtagaatgctgaactgggacacaggagacctggttttgagtactgcccctgctgttatttagatatgtgagcctctgtgtctgtgtgtctcttaacttctctggatttcagctttcttatttatagaacgagagaagtaaacacttaggatctttaaggttacctctctcaatgactttaatcctctctacccttataaatctggttacctctcatatctgacattggacagtacctattattaaacatgtgcttaagtagcatgtactataaggtaaatagcaacctcacagaggtcagaactgaataaccaacaatattctcaatcaactttcagttcttcttccttacctcatccaagggatcagccaggtaataagaagataaggcagcaggtacagcccatgtctattgctaaaatctaccttaaggcaggaagctagtgggtgagatctttagatgatgcaccttacaaggctaattgagttgttatatttaaatttattggtagcataacttgggcaagatggggaagggatctagtaaaaagaaaattgtaggcttgtaaaatgtgaggcacgtggaccaacacatttgtctctgtgagatagtaaccccaaaaggttgtgggcagaggttgcctgtgcaacatcctcaagttgtctcttaatctggttgagacttgtcttccagatgaagcagcctaatgttgatatacagagaatctacactaagttgcacatagtacatgctcattaaataattgttcattttctgcatatccactttgtttctgtacttttagggtgtataattccttttaaggcaaataatgctgagcatctttggaatgaagctatgaaattatatgctctgctaatatcctttgcttgtgagtgacaatacagtatatattccttaagcttgaagaaattggaatttcataaaatcttgaaaaaaatttttttctatgtgcagaggagacgagagagagactgagaaacagaaaactttgtccaggatgggaaccagatctctctctctattttttaaattttaaattatccaaccgttaaatataaacattataatattttgacaggtttccaaagaaataaaattgtgagtcccatggataatgatttttctgagaattccaggtacagaataggccctttcaggatttcctgtttttttgtttgctttccttcgcttcttattttaggtccaataaaccttttactttaagcaggatcaagtgttaagacaaaccaactacagagctaatgtatagaacattaattctatagaaatgccctataaaaagcaaagaaataagactaactattaaaagaaatccatatgtctctggaatttttatttaagtttatattagcaataatgaccttggttctagggaattcggtaacgattaatgaccagcaaggggtcactggcctcatggtgctttgggccagcaaccccttccaaagaggacaagaactggccatttatcccaaggaagtgccctaaggcgaggtccttatcctcttgccatctgatggtaatttaacctcagcttttaaagggcccttaggagcaaatatacaatgggttgtgctttcagtattttaaagagtttatttttgccatgcaatgcctaattgggtatcattgaaaagagttgtcaaaataaagttggtaattatgttccttttattccggggtacatatactcattttgtgtctgcatatctgctggcttgtattggtgtagtgtgcatctatgcagatgcttatactcacattcccatgtctggggtgtgtgtgtgtgtgtgtgtgtgtgtgtgtgtgagagagagagagagagggagagaggggttaaaatacccaatgccagatcaacagaataaataaaacttgaatgatagaaacttcagtcacattagttttgcctgcaagaataaatccctgtaatatgtaaaataaggggccagaggcagagtaaaattagtcttttcttggttacagatgactggtgtggcagtgactggcattggcgttttgcatgttctatgtgttattgtcattactgtaattactgatgataactaaccatttatgaagccacatattagctgaattctgggtattctctcatttaatccttacagcaattctatgtgctgagtattcttatttctcccattttacagatgaggaaactggggcttcagttggttaaataacttgcccaacgtcaacatagctattaagtggtggagctgggatgccaaccttgcagtgtctgaccccaaagatcagggttttaatcataacactattctgcctctatttaaaaactaacatttccattttctaagcgcagcccttaatatattcatttaggcaaatttccatcctttgctggcgtaatcgctattccttttgttggtcattgctcccctgggcttccttcaaacatggtcagaggtgccccagactttttaaagatggaagaaaggccacatggccctgcataatttgaccgagacagctgtgcagttggttgtctcatttaaattacaaccacaaaaaagatgtgccaggcttcattgacacaaagctaagggcaggaacacggaaccgtttcctgaacctgccctgggttcctgccaaaggtaagcagccacgctcagcagggtctcacggaccactgaggaggcagtgagcttcactaaaacaattatccctccccagggctctgccgaaggtttgcagctccaaattctcatggtaaaggatccgtccagtctctgaattccagcttagaatggctgacctaggcaggacaattcctctgagagcgagggagaaaaaacaaaagtgtgggatttaaaaggctggtattgcaaaggatcatcttgacaggctgtggctcagatttagagaaaccccgaactgatttgcagaggactgaacaccaaaccttgtaaccacagagcagacttcggggaggtagtcataggacctgacaagcaatcttttaatacagaatctggtacaaagatccatgtgtgtatttttgctgtggttttttttttttttctatatcttttggaatggagtctaatcgtccaaaggatagttttcacgtgtagtgtttttctctttgatttgagataggaggttttctgtggctgctaagcaatacacatatacctacgtggcatacaatgtcttttttttttggtggaattcttagcatgcatatttttctcagctaaatgatttttaacagcagttatttagttcctattgcacctttccaaaattgcgttcatggtagatacttctcaaataaggtttagttttattaaaattcttacgtctttctgaaacaaatatactaaatcttccagaagagcccataataataataatttttttgcgtgtgtcttatgagcctgtgcgtatgtgtgcaccacgcagatttgtgtacacatttgtatgtaatactgttacaactataaatggcaaaagaacgtattttaagcctcttggggtttcaacaaattgtgataaaagggtggtggtggccgagatgactttctcccactctattaagaaaaagtgcaaaatgaatgagggcaaactgctggctgcgattgtgattgtgcacaactgcaaagcgggatcggctgggatggaggccacggagcaggaacaccccgtgtcttgcccccccttctgaatgcctctcagtagtggcattgtggggactcatgaattacttcttacagtcggggctccttgctataaatccagccctggtgccgagcgcactgtgggcagcggagcaccgagccgggccggcggtgtttgtgttgttgttagcgacacgtagcgagttcctcctaagcggaaaggccccggctccagtttgtcgccagcgaaagccgaaacacgagtcgcacatgtggagcgggagccgtcagccgccgggcggcggggtgggggggtggggggctgcgggagcgggggggagggggagggaatgcggcccgaggcggggcctagcgctcaccgggggatttgtttggggggctggggaggggagagaggggacagggtgggagcaaagaaagtagcccaaggggaaccaggaaaaggatgccttgacctctaaatgttgtgccctccccgtgacatctcactacttgtgagaatatttgagaattaaaataaaaaaaaaaggaaccctttgtggtgcggcttcaaaatggttttccttcccaggatatcctgtgcctgtctttgggtgagtttttcataggttacttggttaggagacttctcctatccctttaagaggtaaaaacataaaaaacaaatgtaaatgtagggactttaacacttccccccttcctaacattcgtataattgctgttaagccacactgaaaaccctggggcctggtgttcaccagggtaaagttacatttcacaagcagaaaattgactcaccacttaggaaaattggctaccaattatgtgtcaaaggctctaaagtcagacctgaggttttctttttgccagaatggggaattaaaaagagcacaggcacccagctttgtacccactactccctccgggagcaattcttgcttgccgctgggtttcttctgagtttgcttctaagccttggcggggaaggagggctcctggctgaacccagccagactggctagcaggatgaacggaggcaggagtcagtcaacccttataagggagttcatgcacaagtatgttacaaacatgcttatggcctgtgtgcagaaagtaactggtggcctagcacagttgaccaaagttctgagagctatgactgagactcaggggcccaggggagctggagaaaggaggggcttctgaaggccaagtcactaaagtcaagggacatctgctgtctctggtgacatgtttatcacacccacaccacgtacattgtcctggaaatttattgttgtctcctcttgtaggagaagccacctgggcaggaggggagacagtcccttgtgggaggactgatggtcctggtggggaagcatggaggggtagaagtcaagagagaacaagaggaagagacagacagggatacagagtcatagatacaggggcagaggaagagcaatgcagagagggagagggaggagaggagagagagagggaggagaggagagagagagggaggagaggagagagagagaaaagagagaagagagagagagagagagagagagagagaaagagaaacgaacctcttgtttacttctctccccgctgtcccctggttctcctgtatccactttcttgacatactccttgccttcttccaaggcctgctttctgttcctgtcagagtggcttatccttggttttgtttttaatgccgtgaaattaaaccttatttagtgcttcattttctgcctctagagggagagaaagagaaagcgttaggacccaccaaattgaatgaatttgctgtgctgtgtcggagagagttagttttgtaggacaaccgggatgtaaaatcattctggagattatcaccagataagcacccctcccaagaacacgatgtgatatgtaataattttagtgaggaaaaccatccttgttttgccttctgggaaatcttatgctatttctatttgattctaacgttggacaatttccagagttctgaagaaccaactatcttaactcctcaatgattttgacagggaagacaaaaaagggacagcaattctggggctggggctggatctcaaccaaaatatctaatttcaatttagtcctggcttcttagctggaacaaagagaaagtttttacattttgcagaatatttagttcgcctcaaagtctattgggttaaaatatatgtgtgtgtgagtttttcctttcatagtggttcagaatgcctgagagtttgtctaatcaagactcaaacattttgagtggattttttttccctccaccatcctacttctctgagatatcttttctagttttaagaatctcacaagctccctcaagtgatgcttaattagaggagctttctatccactaagtattttcttaaatgtataattgattgtgcaaggaaggaagagctgctggagtggaaatcatacatcatttcattattaatggcaatgtctaagtaaaatgcagacattgtcatgctaatggatagctgtgtatgtttagctttaaatcagaagcttttttcccctttactgttctgggatcattttaggaagtttaagtagcatttaatatattgataaatacctgctagcatgctgggctaaggttggaaaaaggagccaaatgaaatcctgacgaatgcaggggaatggtgtgacaaaatgaataatttgggatgccatgtacattattacctcctttttactacttgtgaagaagctggatttttacctggatttaatttggaagacatgtgtatttagcacttactgtgtactgcttccactgaaaacatccacagatgtcctcagagaacaacagaactgaaaagttgctgaacggccctcaccctgtttttggtgtggaattcatcagccagagtgaaagagtctcttgtggatcctgaaatggctggcttagatcagaggctttcttagtttgcagttccccagaaattagaccttcagcagggatttggatgcaggtagtttatatgggcatgatcttaggaagcaggaaatgagggagagagaagagggaaaaaaggcaaggaagaaaaagtaaggcagtgatgtattatcagagtcactgctgtggctggtacatggtcccattggaatcttctaagggacagagtaaaatgtgcctcctagagccaggctccagaagtacaagaggctagagcattatctcctggcacctgtcccctcttggttgagggctgtcccagggtgctggtgtgcaggctgggcatctgcttcagagttggcatgccgtggaaggaagccacgacatagcaggttgtggtcagggtcagacatgtggctgaagtcagaggtgggacacagggatgtgaggtaggcaccagatgcatctgttatagaagctgagtgtaaagttcctatggggagggaagcttgatagtccatccttttttctttattgagtacctactgcgtacttgggtgtaggaggcatctggtgattcttcattgagtccatcaagaagtgcacaaattcatataccacaaatgtttgttgagtgctcattgtatgtctggagaccattctgtcttcttccctaagagtgttcatgctgttggaccaggtgttatgattttgctctggagaataaggtatttccacatggagcatgtggaaaatatagtgcctatctcctgaaaggtccaggtgatgcaaagatgaatgagacatgattggaggtttttcttctgtctgaaatgcagacagttctgggttgggcagctctgtaagatgctgaacatgtgtccttccaagaagcaaggatcagaaagcagactttgatgggggatgtgagagaaaaagttcagacaggcttctatgaatttactaaaagttttggaaaggttatacccccgtgggagggaaatagcagtaatggggtatgtggcaatgggtacaaaagggttggggctgatgtgtgaaggaccttgaagggcatgagaagaggtatgggttttcttttgtagggagtctttttacacaaaggggaacataaaattcatgtggatgaaaactcaatgtcaaaacatgaattcatcttcctccttattattgatggatttctctgtcccttcagttataggaaccgaggagtcatccttgctgttgcccctcccccatctctgtcagccatactagttatctctcagctctgtcccctttgcgccaccccaactctgccacctgactcctgccttaactccagattggtgtctctgcaatcttttggtttctctagagacccttctctccttataggagccaaagtaagcttttgagaattcgaagctgatcacgacattctgtagcctttaactcatcagtggctccttattgttcttaggataaaagccaactttcttactcatctgctgttcccattgcttctgtcacggacattccttcctctctgagaagctcaattcatccgtcagattctagcccctttcccttcagttctcagagacaccttcactccccagctgggtcagttcccagcataggatgctctaagccccatgcagccaggagctgtggttgtttgtttactattctattcctcctgacactcagtactcaataataaacacagtgccagacactcggtacgcagtaatatctattgaatgagttattggatgaaaagcaatgtagcttgtggctgtggagggtacggattctgtccagtgttgtgctgtagctggcttatgtggactcatgagaaccaactgagtgaatcttttcccagctctgttcagtgatatcacattggtagcttgaagtcattcatagtggggatatttacaccatagaaattggcaaacactacagagccgggctccctccacccactttactcagaacactgttgatcctgccagtcatgaatcttatccaatcttaggtttctcagatttacccctccatactatgtctttgtcaccagttttctggagggcagagatcacatcttattagtctctgaatcattaatctgtagcagagtgtacaactcaataagcacctgtttaaaaaaagaaagacgctcactagtagcttgagtctccagtcctggcatgctgtctcttctacttaatgtgctctttgagaaaaggattttgaaatgatgctttggcctatttgaggtctcttcccttccaccactccacttaggcccatggctcttacacattccgcttatgttacagtagaatgttttaataagtaggatttttgtcattgcacaagtcgacacaattatgggaatagctaaaattcaccagtagacctagtgggttcaattcaacaagattattgagagcctgttttgtgggagatgctattgctcatatgctagtgaaacagacattttctaccctcgagggtctgtgcactgagaggcatagtcatatgcaaaccaagagtaactgataagatggttaaatggtgggacagagtgtcaggggcacctgtatcggaattgattaattctgtgtgggggtcatggaaagctagagagaagggatatttgagttagacttggaggaatatacggagagctgtagggaacagttcccagaggcaaggagatcaatttgggaagttactgggatagtaatggcccagagataatgaagtcttggtcattactggtggcagagctagaaggcagtgggcagggaacaaagctcagataggctatggggagctgagggagaagagaatcaaggtgaactgtctggatcattttttcctccagtcctttttgtggtgggaagatgggagaattggaatgatctaaatatggcttcctaatgttcatgttatcttgactaatcttgataagactttatgacaactttatctcaagctcctgcagtttcaatagaaattggattttaggatgcacaatttgatttagccaaacagctttggacttccatcctacttcattgtccctgagtgtcatgactgtcattgtctgcattctaattctgtttctatttgaatcattcattaagtacctaaaaattatgcatatagtaaattcacaggataccatatgcaaataggaagcacccctcaccctggtcctaaataaacattgtggatttgttaagtaaatttgggagtttcagatcttttttttaatgcaatgaattgtaatgtcacacttccaatacgacaaggattcttttttttttcttcttcttttaaatacaaggggaaaaaaaaattcattttgagtcagaaagtgggtgtacgtaggggagaaaaaaggagggagggaggaactgtgtataacttctcttctgcgttttggcacaaaaaagttgctcccatcagctcagcttggctaagagaggcctccagataagaattcttgagatctctgattcttctccacatgaaaatttaaaaaacattaaaaaaagaagaaattacaaatgatctgatcttgaatgccaaaaatctaacctttgatgttggcttttcggaagttaaataatgaaccaaagtttctttttttccttttttcttaaaggactacttcataaagcctatcttactttataataaaaggaggaaaacataaataaaagacactcaaatatttatacagttattcaaaggattaaatgtatttggtaaggtcttaaggttgtttaatattttccccttcttttgaatctttgtttttagctctggtacattgaagattttctttttcctgtggttttgtttatagaaattaacaaattcccttgtgatccttaagaagttactttagaaatatacaaatatacatgaatgagagaaaggggatatgaaatagatgagataaggaaatattgtcataataactacactctttatattacactacttagttaacactacgtataattgaataaatgacaacaacagtgagtaatagactacttatttgactcagagagaaaaatcttggggacctgcactttagaagaatataattttacttttaatttttatgttatatgaatactctgtggcaatgtacatactccacatgtattttctgcctcgtgacttacactggaagagagaggaatgattagtttatatgttaaaaatgcagtgaatttttatttgtcctgagtccacttcctccactcctacacaccagctaggattctcttgtgagacagaacacactttatagttttggtttgtttaattatatgaaaatttaagtattcagacaatagtttttagtagattaaaacaacaacaatagcgacaacccccacaacacctgcattaacttggggtccttcaaaagcccagtgtttccaataatgtaatttgttgcttaataaataggaggttgggcccaatatcctctgctaagattgtcatcacttacacttaagatgaattaaatttctcttaacaaacattagtgggtattctatgtagttaaacattctggttaatagataatttcttcatatgatatacacagaacatcatttttagatataataacatagctatgatcaatacagttttattcaacaattaggtgttgtataaggtccctgggggaattgtataaagtgttcccatctctcaaagaacttctcacctagtgacatttttctgtgattcagagataccttggtgacttgctgtgaattagggtcacaattatgactatcatttatcattgtactgtgactgcacaagtgccagttaatagaagattcagaatgatagaatgcagaataaatcacatcacctttttctggagtagtgtcttggtgagccgaagcagaagcagagaatggatactgatattatttccatctgcaagccctcatgacgtatgaagtgccgagagacatttatggttttgttgctaccattaagacctttggcagagtcctaaacttattttggtctctctctcttttattgcaagctatttccagctgtttatttttatcttgctttgagatgtttaaataaaagacataatttgaatctaaattgtggttgttatcagatctggctagaataataagacagtgataccaattctcctggcttgaagtttggagtagtgggtcatttattcattcagtggacacctactatgtaccaagcgaagactgttgtagactttgcatagactttacagtctagtgggagagacagtcattcaaagaatcacataaataaaggtaaaattacaattgttttaggtgctatgaaggaaagggcaggaggatgatatgatatgccagggagaagaactggcttattgagggttctggaaatgtgtcctcagtgaagtgatgatcaaactgagcaaatctcttatgcctgcattttccccttagagtccaaacatacatgctggagtcagatggacaagggttccaagcctccaatgttcctaactagccataagaccttggaaaagtaacctcatctctttggaacttggagtttttgtctgcaaaatagagaaagcaacatccatcctgctggattgcttggtgttgttgaaacaatacattctataggtacctgattcaattagacagtaggtgcttcataaatatcagctactattattatttcacctatgataaaatataagttatgtgaatcaggccttatcctttccagagatattttttaagagggctttcctgaagcctaaccttaagcagctacctagtagctccctgtcatgacatcctatttaacttttttatttttttttttttactgtgaatgtttggtaaataaaaataaaatatatgtaacacatgctataaagtcatccaaacttgtgaacactctacagaacttaacaacttagactttttaaaatttaagatattaataagtaggagggctatggtacacttgtctttagaagacggattttttttaagtaactgaaaaaggaggtaattattttaagctttaatatagtttttgttgctggggagccaaaacatacacacacacatgcacacacacacacacacacacacaggcaaagaattttttttttcctttgggaaaacagtaatatgtgtaaactggtttggaggaagtttattgtttcccagccagaatgacatttaggatatttgaattcattgatcatagttttaggtaaataaacactgaaatagggtcagcttttagatatatggatgggctgggatgcaagagaaaggctggcttcgggtccaggctttgcctttgatgggctatgtacctgggacttgtttattttgctttttttggagcttcagtttcctcacctctgaattgagtggatgaaaggaccgtcaaggtttgccacgtcctcattccctgcttctgtgatctgatcttctcagatccagatccctttgtgagcagaagatgcaggcagggaccaggatccccatgaatgaggtaggctacctgcaggtgtgcatccctccatgccatggctttgatgggttggcgccgacagcaagcttttttgcatgggaaaaagttcccttccaattacacagcagttttgtggtggctgaggggctataatgggaatgctttgcagccaaagcactctcattcataaattccactgtgacactctctctaatttttttctcttttggatagatcagtattctgtggtttcctccaccacagccatgcaagcaaaagtgagtagttaaatctcgtcatggcctttaagtctctgcaacacacggacatgacagtgtcaatcataagcaatatttggtgcagtaaataacagtgagctgacccttccaatatcttctaggaggcgtctttaaaatgaagtacaggaaggaactaaatataggagctggtctgtttctagtttatggatttctctagaaatagacattttattctggtaaaagctctgtgttcatcacacacagctagatgcatgtgctgaatgtcaacctctgtgcaggtgtgaatatctaatgtaaattatggaaatttaggctgcttttaaaaaatattttctacatctgcttttgtaatttgcattattcctgggatccctttctagaagtgactaaaatgcagaaagaaaatcaaagtaaatgtcattcaaagaaatgaaatacataaaataaccacacagaatccatacgcgacaggctgttttagtatttatttttttaaacgtaagaagtatatatattcccttaaagccaatgtatgagtccctttagcagtgatctaaaagatttctacttcatgaaaaacctattcctctgagaatctgcaccctgtgttcaggtaggtatgtatatgacacagaacattaaaaagttaacgtttgccttttccatgcagtgtttgctatgttttcatagcagggatgagttagattcagcataattggaatttcagaaatactgttagtttattaaggcattggggattggtcaagctcagttcaaatgaccattgatgtgtgtgacgatgggtaccaaattgtggtgtactgaactgtggattgtaagtctgccaagggtttgcctctgtatttctctttggaaaagatgactgttcctctgtagatatgtagcacagaatccgtttctaaacagctactataaaatctgtttattggtgtctcttgtctacatacagccacctgtctaaaagcataaattcacatgtagagagtggtctattctccctacatgagtatatgtcacccccatcggcatcagtgaaagctatgtgcttaccagcaggagaatagattcatatgctgtgaaaaggtatggaattctgatttatagtctgtgttgcttttaatggatatacctgcaacagccacagagctaaacctgtaaggtgttaaaataaaacattttacagtgcaatatattgcctgcttgttagttaaaagcactaccagggagcacactttggttaaatttggctgtgttaaaaacatatgtaaaaaaatctttgttttcttttctccattcttgttctctgtatttctccaaggatgctttccctgtttccaggactcaaggcctggcaacaccaagggcactgagggtggacatgagtgtggcttcagacgaaactaaaatgaaagattaaagcaattctgaaagatttcaagataggccactgccaactcagcttcagaagaagaaaaagggaaggaaaactagtttcttgagtcgcttgtaatctggatcatagccattttggtggtggcctcaatggatgtaaagtagatagtgctttcaaacccttcatgccaaggctcaaaagcctttgcagaatcatttattaaatatttaagcgcttcctctttctgcctctcactcagcgacagagagagcctgagagcagcattttctaagcccagtgtggtgctggtgtgcggcactttccttaggtttactggccagggtcagctttgttttggctgatgctcaagcaagcacccctcactcacagctgcaggaccctcaccactacagttacaaatggatctacgtccttttgtgtttgtggagtctttaagtgaggtggcattttaaagaaattcacagtgctttagagaatggttaatattacatttgagcaaaaaacaattttacgcataaaatttaggattacctcaagcaaagcttttgtttagttttgtcaccttttagaggtactccagaaaatattttaaacctagctgtgtatatcaagggtctggggacctcattattagaaatggtggtctgtactcattcgatattttattccttacttgttttactccctgcccaagtcttgcttttaggtgagcatgaatcaaatccaatgggacatttttagctcttcccagggcccttgagaaggaataatagtatgtgttggttttaagtttcatgacaaaaccgcttttaatatttaaataatttttcttctgaaatggggaactccaaataaaaaagttatttaatagcgaagttactttaacaactggctttcctgtttctttctttcttaaaatctggaatggtgctaaaataaagtataatgtaatatttcagataaatatatttaggccctgtgaaaatcctgcttcacagcatttgtagggaaatgtaatgcatgcaaaagtagacagtagtttatatagtagttttattttaactagtacaatataacaacctgacatgctgtgaaaaataaataacttttagaaaatgcattttccaagtatgaaagtaatgttgaaaaatgactgaggtaatcacttttgtatagattctgaaagtagaagagaggggaataataatttatggtttaatgcatagagttatacaaaagtgtaaaagattttcttttctgacggacccagaggaatctgctgtgccattttgcagaatgactcagggaagagggctgacttgtgagccagcacgtgcaggcatcttggccaactcatttataccacagactctttgttttggttttggggttagcagattgagtaaatggatttcttttttattccttcagaggaaaaaggactcttttggctgttaaattccaattttctaaaggaagtaaacattccatctcaggcttctcacacatcagataaacaccactttgaatcatatgtttatcctggaaggaaatcgcctctccattttgtagatgggggcccaggaaagaggctacttgtccgagatcctacagctagtgggcatctgaaccaggatctctttctaccccatcccattagccctcctgggaagagttagggtggaatttctgagacttccacagcaattaggtgctcagacactagatcaaggggaactttcaaagtgttgttgatagtcttgctaataggtcaggcagcccaaaacagcgcaaatattatgaggtgatcagcactacaccaaggaatggcttaggaatgaggtctgatccccactctccatagtctctatcagctacccactggccttcttaaatgcagtctaagttaatgtgtgtttgcttgctgtgaggcatggcctctttgctaatttctttcacccccatactctcctcctgtatggaaatactagtgccaccctgcatttgattttttttaagttgttttgaccgtgagtcttaatgtctccctttgatatgagtaggtaggtccatctcgactggagaatgtatacataaaaagtctctttcattggttctaaaagtgtaaaatatctgggctgttacctaaatgcagaatggagaaggcagggcaaggtcagagtagggtgggtttcccccctcatttccctccactgtttcccatggtgttttatctttttgccataaagcttataggttaaagagaaaggtgagattgctttgctgtctgtcatggtgatggtgggccgtgagtttagggagaaaggactgccgagataagaaatgaaatggtcttgaatctctgggattgcaaaggacaaggaaagatatggggcaaaatcaagacatttccttcacagtatcccagagaagtgtggtgagttcttcaaaaatagccttggcagccagcctctcttgccactctggcactgcacacgaacctaggtatgggtatttgtgcagaaacagtccctgcaaattgacttgaaccccagtcctctttccctaggagatcagaggatggctgatgtggcaaatgtgatggtggcagtggtccttattgataaggaagcttggaggggttgagagaggagctgatcttcttttttttattattatactttaagttttagagtacatgtgcacattgtgcaggttagttacatatgtatacatgtgccatgctggtgtgctgcacccactaactcgtcatctagcattaggtatatctcccaatgctatccctcccccctccccccaccccaccacagtccccagagtgtgatattccccttcctgtgtccatgtgatctcattgttcaattcccacctatgagtgagaatatgcggtgtttggttttttgttcttgcaatagtttactgagaatgatgatttccaatttcatccatgtccctacaaaggacatgaactcatcattttttatggctgcatagtattccatggtgtatatgtgccacattttcttaatccagtctatcattgttggacatttgggttggttccaagtctttgctattgtgaataatgccgcaataaacatacgtgtgcatgtgtctttatagcagcatgatttatagtcatttgggtatatacccagtaatggaatggctgggtcaaatggtatttctagttctagatccctgaggaatcgccacactgacttccacaatggttgaactagttgacagtcccaccaacagtgtaaaagtgttcctatttctccacatcctctccagcacctgttgtttcctgactttttaatgattgccattctaactggtgtgagatgatatctcatagtggttttgatttgcatttctctgatggccagtgatgatgagcattttttcatgtgttttttggctgcataaatgtcttcttttgagaagtgtctgttcatgtcctttgcccactttttgatggggttgtttgtttttttcttgtaaatttgtttgagttcattgtagattctggatattagccctttgtcagatgagtaggttgcgaaaattttctcccatgttgtaggttgcctgttcactctgatggtagtttcttttgctgtgcagaagctctttagtttaattagatcccatttgtcaattttggcttttgttgccattgcttttggtgttttggacatgaagtccttgcccatgcctatgtcctgaatggtaatgcctaggttttcttctagggtttttatggttttaggtctaacgtttaaatctttaatccatcttgaattgatttttgtataaggtgtaaggaagggatccagtttcagctttctacatatggctagccagttttcccagcaccatttattaaatagggaatcctttccccatttcttgtttttctcaggtttgtcaaagatcagatagttgtaggtatgcggcgttatttctgagggctctgttctgttccattgatctatatctctgttttggtaccagtaccatgctgttttggttactgtagccttgtagtatagtttgaagtcaggtagtgtgatacctccagctttgttcttttggcttaggattgacttggcgatgtgggctcttttttggttccatatgaactttaaagtagttttttccaattctgtgaaggaagtccttggtagcttgatggggatggcattgaatctgtaaatgaggagctgatcttcttatcagaagcaaggtatctaaaagtgccaacccatccctgatgcgacaattgagcagttgaagtgcaactctgaaattcttctcttctgatctctcaatcactgtcttcagtcttttatcctgcatcacaaactttatcccttactctgcacccatgaagccaatattccctaagaaccaagtctctcctgagaaaggcaaggtgatatgaatagagtgaaatagtttcatgtcccccaccactgggggtcaggaaaggagaacttcccttttaaatctttggggagatcaacccaaggactgaatcttttaatggtaaagttcaaggtccttcgaaccccaaaaggagattttaagggagtgagtgattatcacaatacttttgtgcatgcatgaccctgggaagggcaataatttggaaggcaaattctgtttcctcacattcttcagcctctccattcataaaacaagtctgaaaagtgatttcttgcctacccatataaaataatttgggatctgataaaaatgataatgtcagtcaacattgcttatgtgacaacagctgttgtcatccttatgtataggtgaggaaagctgaagcttagcgaggttggatgaattgtacaaagtctacagctagtttgtagaaaaactgggatttgaatccaggtagtttaatttcagcctctaagtatgaaaccatcactctgtactgcctccttcaaatatggtccaagatccttcaatcctgtgatttataacgtcaaatttctgctgataacttaacctttggtatcatttaacatctagagctgccaaatagattttctgactttaaaactcttggtttcttcctggcatttacttttcacttattttggtgtttttttaatttattatttattttttattttttaccaatgttccatttagcagaagtaaaacagaaaatttttggtgatttagagatgtttcccttcttgtaagctttcagtcactgatggctgatgagcctttggatttattgctcccctgatgaaatggtggtctaaactcagctgccttggttctcgttctctctctctctctctttctttctctttctttccccctgtttctgatggcttcaatcagtcaataatgtaattaggccacaaaaatagagaaaaccagtggcttctggtttattttttgattttctagtaggaaatacccctaatccttgatgttctcttgcatatattttccaaagagcaccatgtgaagccagatttttattgactggtctttgtttctcaacatgaggggaaaaatggggatagggcattgtcctggttggacaaggtaggcaggaagcatcaggcagcaggatcttgtgccttgctcttggtttttattacctggagctccatcatgagtctcagggtggattgaaatcttgcattgaggccaaaagtgaaaggaaaaccaggacaaagaaatctgcagggcaaggggtggggcttggttagcaagagcaatggaaaacaacgacaatgaagtagcttgtagcttgctgcctaatgtgtgtaaagcgatggtacaggcaagatggagttaattcaataaaataaatataaaatactctctcctctgtcaggcctcgctggaagcaggtcaggggtcactgagccgcttcactggagcactaatcgatttgctgtcaaggtggcctgctggggtttcaagccagagaggaattgagaggcgctctggcccaatttccataattgctcactgcctttagtgtacaaccttttatgaaacacaaaaaatatatcatggaattgtattgattagccattgggctgaataattcacttagtatttattacctgaccccaagaggttaaataaatccactatctaacttgggtttgtgagaaatattacttattcattgaaatgtgggctgtttattgcacaataggcctgtatctttgtttcttgattttgcaatcaagattaacccttcttgcattttagggccaacaagtcaaaaaaagcatagtttgagtgctccccaaaataagcccaataaaatcaatgctgaatatccctttgaagcagtttttttgatgttgaattttagtcctttgagtcaaatttcaagatggcctcaatgtatggatgccaatgaaatatagatgcaagcctggttttcactgcaaacactacatattataataacagatgtaataatagtgatgacatctaagcccatttttattacaccatttttggaaagcttaccctattacattaaacacccataaattagatgtcccaggagacaaaggggtgtaggaggtcgttgggtagaatgaagacttttttggtcttaaagaggaatcaatcctggacagataactgatatttattccagaaaaaaagctaattttcagtaacttgaaaatatgatggaattttatctgtagggcattttatgcatttgtaaactttggggcaatcattaattatttaccagccaatggcatttgcacatttctgttactctgagcagtaaatctgttttgatgtgctatgcatcccaggcacaactacatgacattcaaatctaattatgttctcagttgccatgagctctcactgtcaagatacaacccttccttaactccctccgaaaaagacgttttaacttttgtgtaaagtctttcttcagtttcctgtctgcatcctctagcatctcaaagcattgtttttgaggtttaatggaatttgttgtaggtcaaggaaaggaagccatgtgaagctttttttcccctctcttcaatgaaagggaaaggaaaaaaacattcatttgagttcagagctaactatgtttgttgatcatttagcatttctgtatccaggatctaatcttacgattaatggtaggaaaagctggggctctggagttatgctcagaatctgcctttcctgtgctgcggagtggaaggaagggatggctgcaaagcgggtaaacgtgtgcagaacttcctaaagcatgctcaggtgcaccccacttcccgcttccaggcggctgctcctgtgaatttgggcattacatttaatttctgtgttccatgttaccatgatttgttgattatcattttggaaattttcaagtttgggttttggtgtttggtctctatatttagtttgggggtgggggcggatgtgggagggtggagaaggtagaggagggaaagagagacagaatagaatacttgattttttttttaagcaaggttttaagtcttgctttccttcccctcccttctctctgtgtggggctcctttaaatagagaacatagttaacaaaatgacttgagagctcttgatagcctcttgagataatttggttgtaagcactgagcaaaatacattctttggatatactcatttcaagtgctaatcatgaatgttaaatttttaaggaagccaatgtcataatactgttcatgacaattccaaaataaatattagtgagatgctttgaagggagagggtggtttcggagagatagggagacagacagactctggtttatgtttccatagaattcttctataatgtaacccggaatctgccataaggcacaggatttgcctatgtttaagaataacaatgtatagaaaagagatctgttgaagaggctagaaataatcactcggttttatgcagctttatgtaatagtccaaggaaactaagagctgatcgaggagccagtggcgtgtcttgatttctaaatataaccattttgaatgggtgagggaaatcccttcctatgcaataaatataatggaaagggcctagtctttgaaatcagatggccctgggtttgaatcctggctaccacttgtacctggaaaaattaagtaaattattctgttttttacatttgtacaacggagataatcatacctatactcacaggattttggactgaggatttaggaatcaggattacaggagatgattctggcacaaattaatgtataaataagtggtagttgttctattgttattcttcagaaaattaaacagggcatttgttacacctgttgatattgactggacattttgagactcttcttggtggagatgctaaactgaaaacaacctacacataccagagcatccaagaatgtattcaccaggtaacctagaagaaatacatagttcaacatttgaaaatttttttttatcattaaaattccttcgaagacgggaggagtgtggctgatttgcaactgcacccacaaaagatggcgggttttgttttatattttaactaaaagtggtgaagattttccaactgttctatttttacaaattttaaaagtttcattgctgggttagatttagggcctgtgtgggaaacagagacttctgccagcagcgcagcgagagccctgctgtgttgtggtttccatgtatttttacattccacgcattgctgaactgtgtataggagcaagctctaaatcaccggtgctttatgtgagtttgcgacctttcgatttgggcttcagactgaatgcatgattttaaaactggagatgtgctagtgactgtgccacagactttgcctcctccccttctcccagctccatccttcacttccccagttgaagtcaaatgtagactttatatagcacaggaaacatttgggactgctagtaaatacgtgtaagaaaggaggctttcgttgttggaggtgcatatgcatatgctgggcattaaagaaagcctggtggagatgggaggtgaggagggggttactgcttcccccaaatgtccagattttttcaggacagattatctgtcttagtggattctggacatgttgttaaagaattccacatacaggatccctttctagttggtgatcctcttttataaattccgacagctccaaatgttgtttaggcccctgacctcttctccacatcccagcctgtccctgggctgtactcttttcttttcttttctttttttttgagacgaagtctcgctctgtagcccaggttggagtacagtggcatgatctcagctcaccacaacctccgcctcgcgggttcaagcgattctcctgcctcagcctccagagtagctgggattacaggcacacaccactgcatctggctaactttttgtatttttagtagatatggggtttcaccatattggccaggctggtcttgaactcccaacctcaggtaatccgcctgcctcgagctccgaaagtgctgggattataggcatgaaccaccatgcccggctactgttttcatacttcacggccccacaaccagcccatcatgcacactacagccatgctactctccataaagtcctgttctgaacatgtcactgtggctcacattcattggaaccctcttgctttgacttatttggcctgtgggcttaaattcaccttttcagccttatattcctttaatgtgctcaggagtgtccatgcttctgcgacccagacttctttctctttcccagacacattcagtacttgctcatcgccaatttcttgctccccttgctccttctgcagggctgcctttcccacctggccctccgctcagatcggatcctgttgtccctgtaaggatccacacaaaggctcgcctctgcaggaggctttctccagctcctctggagggaatctgtcctgcctctctctagtgcttcattcatgatcagattttaattaaaagtatatctatttactcaacaaatatttgtggagtatttcttttatgccagctcctttgcttatgctgggatgtagagatgaataataatataccatcccctggccatcaagggttatttttaaacattaaaaaaaggttagaaaagtaatttaattgcattacagaaaaattggaaaagacataaaaaaggaaagaccccataatccaattataatcatcttattgcacttttaattcatgtgcacttctacattttaaaaaaattatgatattgcaactacaattttgtgttctttgttttacattcatatatatatatgtaaaacaaagtatatatatattttttctgtgtctctacatagcctaggtttaatggataataaattaccttcttattgttgaaaattgaggttttttcattttcaactattatttacaaataatactgatgaacatattcatatttatagttttttttttttttagaaggagttttgctctttgttgcccaggctggagtgcaatggtgtgatcttggctcactgcaacctctgcctcccagattcaagtgatgatactctcgcctcagcctcctgagtagctgggactacaggcacacactaccatacccagctaatttttgtatttttagtagagaaggggtttcacatgttggccaggctggtctcgaattcctgacctcaagtgatccacccgccttgggcttccaaagtgttaggattacaggcatgagccatggtgcccggcctagttattttttataatttggatcatttctttaagatagtagggtgatttttaaaaaattattagaacttctttttcaagtaaacttgaaacagaatctgaatttctacaacagaactgtgctggttgtcaggaggtagaatccctatagccccacgcattcttcccctttcataatcattccctggactttgctgtcagaaatcttgaagcccctctgcagaatcctagggctttgcagaaaatactttgaaagccttgggataaatctcagaagaattactccttcagacacttcaacattttcatggctctcaatgcataatgtcaaattgttttccaacaacttgagtctccagtgctcgattctattggttatttgtgagaataccacttattcaaatctttgccaacatcgtgtatctatcattaaatttacttttacctaacttaatagattcaaattgggctttacttacatgagtatttctcttatgagtatggttgggcattttcccatatgtgcatattttatttatatgtcttttttggtgacttctctatttcattcccattgattcattctttatggagatcttattttgcttatcaattggtttaaggctttatagaataaagataatagctatcaaaaataatatatatactttagggttgtgaaacacgtatgattgattcttccattttgtttgcaaagcaaacaactgtgattttattcccagtacccactctgccacactccagcctcactggccttcttctgaaatgccaaacctgttcatcccttgggaacttgctgttccttctttcaagaacttttcctgcagaataaccatgactggctctttcttgtcttttagctcaaatatcacctcagagaagctcctcctttccttccaaccttccatccaaccatcaagccacccagtcatccagtcctccatttatcctttaacaaatgtttgttgaatccatgctccgtgctagcactgtgcttggtgcaggggatacagctgtgaacaaaacagatgaagtctctctgttttcatgttgaatatcttactcttatttgtttctttctttaattgtgtgactccttcacccccacccgtagaatggcaattctgtgtgaacgggtaccttatccttcttgctcaccattacattccagcccaatactttctaaataaatatttgctgaatgaaaaatatttctaagcccaccccttctgcaatctcctcctctagtacggtaccattacaattgcttggtatgttgatagcatcttttcagaagcttagattttcttagtccagcagtatatttattgggtttactctctcttccttgtcaccaagttcctggatagaatgaaatgagggaatatcctctctcctctatccttaccccaagtcctcctattgccatgatgccactcatgaggtttgatccaaaggatgtatttttcctttagtgcatgagcccagttcccattagggttaatgaggaggatgctctttcatctagagcctgctgggattgttcaagcaccgtctacatacttaaaatagagacacttcagaaagtaggaagcagttgcacaaagccccaacttcaacctgcttttaataatagaaactcttatttaccaagtccgtgtcattttttcccttgcaagctttatttggaagataaatgggctaaagttcatttttccagaagagagtaaatgaaagatccatatgagctgggggaaccctgggtgtgacaaacttgcatgtactttgtacaactcaggagctgcaaagatctactcaaaattcagctgtggcctaccctgctgagtgacagttgttggaaggctggaaaattccggctagaggggtaggaaccagaatcagcatgtccttgtttcaatccagtaagtgtttttcagatgccagctgctacacagtgctgagaagtcaggcagtgactatgataaagaactaacgttttgggatagtgtgatctgaagatcaactggtcaaatgaagattcccaagcctcagccagaattagaatatctagggtcaggtgactaggaatttgcattttcagcaagctcctcttagattcttttgcattctaaggtctgaagaacactggtgtggtagtgtgagaaagaaagacagaaaataatgattgagtgctgaatgttaagcaaagtgctaggagagggtatgttagggcagcctaacctggtctggggatgaacagtggtctgagaaggctcctggaagaagcgacattgtattagtaacttggaggagtaagggttagctaggaggggatggggttgaggcctggtcttggataaatgatagattaataggaggaggaatttagtagctctctgaaaagtgttcaagtcatcagtgtgaactagcacaatgtccatgtgtctacaacatcaggaatgggaggagtgtacaggtaggaatttcttgctcatgaaaaaaatcaggctacatagtggcactgcccctgctgaaatgctggacataccctcttcctgttttctaatggagggacgaatggatccaggacagccatgaaaatatgcactaatggtccagatagatgcctgaggccagaaaagccaactgggtggggctaatggaaattaggcagggcccaaactaaatgaaatagattgtatctcctcttctcttcatttttcagtttgtttgattccccccaagtgggaatttgtttgtgctgcaggcagaggcctacttttttctcttagcttagagacacagggagggcaaggagcagaaaaaggaaggtttgattattagaaaataaagcgacattggtcctctgcttgtgtactgggccatgtccttcccagatcaactatctgctgatctgatgtagtagatttcgatgtctagggctgcatttagcttagggaaataaaaatttgatttgagaacatgcatgccttctaaggcctgtagttctggagaaatgtgagtccagcatgtggggtggatttttttctgtgctggggaataaaggcctggacttcgttgggatggtaagagcaatggtggccagcctaggactctgttggtgtcagttctagttttcccagcattgctaatgggaaatgttatttctgcccccacagttcttaactcctatgtttgcttggtttgttagcactgactggcttccctctgtatgctcttccttctcctgtagtcttaaatgttcttacactgacctggctatttaaaagcatgaatttcctgagttgaggctatttgtatttaacctggaatttttcttccctaagtccaacttatattaaaaaaaaaaacagtcttcattaacacaagagcctactcaccaaaatactgactaagtctggctgtagaatttcacttcatgaccttttagggttgtgaatgtcaaagactgagcccggggcagtgtgaaataataaacaactgggccataagatccagcttgacgggcatcatctgaaatcaccttcctgaatttattagagttaatcaatccaggctgaaaaacggagctaggaaatctctcccaccatgctctatttcattcacacttccttcacgtaacagacatttgtgagttttgtttcgctgttgtatttttttgagacaatcaaacatatccccaaatagatgctccttggatgtaacttgaaaggtgataaaatgcccaagaagaaaatcaccaagttgttgcttcacttgaattgcccagggcttttttccaaaggtaaaacttattcctcctattcagaggtgtatgttggtggtgacagtagttagcaggaatcacatctcatttcaaacatccaggcagacctgttgagatacattaaggagatgacccattgaaagagagcttcctatagaaaaatcttacagggttcaggctagggcaactgcttgtgacctcaaagattggaaataaaaaggctgctattagttccacatcggttctcagagtgaatgttgcagagtgatggagggtgttaagctgtcaaataccagcaagggttaataaggttaaagaagaaataaaagctggtcaacaataaagcggtgtggataaatcagcatcaataaataaagcatgtcatgtcatgtatacacagtgcgggaaaaacaaaaatcataactcatgtactcaggcagtagttgcaggaattcttcagtgggacatcccagatgctttccttgggcatcttacatgcttacttggacacatcaacagcccccttttctctctggaagtcatttactctctccccttttagaagaattttctaacatctatcagactgtgtaaaatataagaagagcagagccagggtagcttagcacctgatgtcaaagaaaggcagttataaaccaccacaccaaggaggtgattcactttcagtcccctttgacctctaccctggaaaggaaggtcagatagataccttttgtgtgggctgtatttgcccagctgaccaggaaaattcagggctttggtggccaaaggattttgcagattattctgtacatttgtgtatttcctgtaagtaacggaaagccttgatgaccttgcagctgaaatgccttcacagccatagacacttgctgttgtgccctagatggaaatcttgcaggcaaggtggctctgcgcacctatgttactgtgtaagtgccaggctccagctcagttttaactggttgatggctggccattccagctgacttgtggacctcacttttattgtttcttgtctacttccagactcaatggctatggagaatgcttctggttagtggtcactcttacttagagacaattctataaagcatgagtacaaagaatcatatgatgtatttattttttaaagaaggacaccccacttacacatttaagtcaatattactcttttgagaagttgagggcttattccattgcttcaaacctattttgactcccagcctgtggcatattactttgactatccttggtagggacaagcctccatccttgggatctgtgtttggaaagagcctaacattaggagtcaaacaggtgatcacgttgggtgatttttttctttgttgcattagattatgaagtgtaagcactgattttttttgtttggtttggttttcgataggactgtcaagggctttccaaaatatatcaagcaagggccgtaaaattggaaaaattacgtagtttctccaagacttaggttctggtagatgtgttgactaagcatcagcctatcactttatagtcctagcttgtcaactgtcacgcaggtaatgagtttttgaaggtgaagtttctattctcaggaagagtcttccagcagggaattagtagtctacgaaaagtgaccttgctgccttctttgcttggatctgttgagctcctggaactctagaaactggtttgtgaagtgtaagagttccaggatctcagcatctggggtggcccaagtcatggagattttatcagaatactatgggctttccctttcttaggagataaggttctggccttcaaacactattttcactgacaatttctctttccttgcttgaataatcccactagcaatctaaagaaagaacttttattccaaagaaacatactcataaagctgtgagttgttaaagagaacatgtgagtttctcatattcctaccttccactcctcctgtttgcccaccctttcctccaactccacattcaacttaggatagttttatttacacaatgaggtctgattgttttggggctttctttgtcatatatcatgccatttaatggtaagcaatacatttgtgactattcttttaggatgcatcagactttccctataaatctgaacagagtgagtggtatggaaaactagctgctagaattttgtttttgcgagtaaaaggcaacgtaacataaaaattaaacaaacatcttcctttccaatcactatctgcatgttacaaaccatgtagatttgtaactttgccaatacactatggtggaggaagggtgcctctgttccaagggcttcactccttggagatgtgttttcagaccgtggaacacagtggggtcaagtctatcagtatgaggcacagggacaatggggagactaatttaaaaagcataatgtgggcatcagacagaattgggtttaaatttctgtattttcctcaccagtcaaaaggcgttgcttggttcagtctgaacttcatttccctatctgtacaatgggcacaatttgtttttcataaggtttttagtgctgtatctatcatgtaatgatcatagaatctgatacagcctcttgattctcttttttctgaagccatttgcataaaatgagtctcacaaacttagcttttttttttttttagtgagaaaattctggcatctgatgtagaaaataaattaatacctgcttaagagttctgttttctgcagtgaagcacagctgttattactgttaatggccccaagctttcacgattcccaaaccagaaaaacaagcgcaagatctttgctatgttgaagggagaactgggaaggcaaggtctcaattcagggccatttggaaatattaatataatcatttaatttcataatttcttttagcatttggctcgatgactttacaatatttttttaaaagtcaaatgctaacaaagagaaaacttcgagtacttcttcttgcattttcttgcattgaaggctcttcttgcattttttcttttttttcctctctgtccatctgtccgtttgtctctctttgaatatgtctgagttgaggagtgactttgagaaacaagtggcgttgcattgcctaaatagcttgtgttcttatcccagcggctggttttcaaaaaaaagactcctttttcagtcccttttcttcttcattatatacaaactgcaaggcagaaagcccttttgcctgtcccctaattccttagcccatccttaattagtgtttttacggttaatccctaccatatatctttaagagttgcacatgcgttggctccccacaagttttattgcattcaaaatagaggcaagctggcagtgtgtgatggtgggaatatgtacagtcactgagaggagttggctgttacttgtaattgattgctcactgaagcctgcccgcgcactttaccccgaggcctgactttcctccatatgcctagtgtcagaacttggaagccagctggtcagtcagcgcacatcctgtgggaagcggcagacacaggcggccgggtagccatcagcctccccgagcacatttcctctgtgttttgataatagttctgtaagctttaattatgctgtgtgacaacacattcatgaactatcaaaataaatcctttgaagagatggctgctaacaagttttgaagcaacagtgcttgttgcaaagaagtcaggagcgaggcaatcagattttgcaggatccccctggatgttgaaaccagatgaaacgttctcttgccttttttttttttttttttttatcgtgctgacaaatgttccttttaaagctatgcccttaagaagttaactgaagacacttattgcaacactcgagtgtatccaacacagcgtttcacaattagcagcggtaatgcaggcattaaagctgtgccccaatatcagtatataatctggaggaacaccacagggtccattaaggccatttacagttgagactgagactaatggtattaaattattacggctattgctaaaagggcattataagtgaatcccttccagctgggttggttgtatatgctctttgtcaacagtacagtcctttaaggatatccttattgttcacgatcgtttagacgtgctgccgtgagctttactgaaggtgtaaataacatccgacaaaaagactgggaattagggtttgattaaacttggcttagagttaagtggagctgagtagttcttgggcaaatcctccttgtctttatatacacacgcacgtgtgctcacacacgggattgcctgtgttcatgcgctgcatgcggctgtgtacttttgcctgacctcacaggcacaggtggacccagaagttaattagagttgcttggattgttcgaggtggttgttctgtttggaacttggcagaatttagggcattagtgttagaatgccaatgagaattctgtttggaaaccacgtttttaagaaagaagagtgattcataatcctcagcatacattagtctcctattttttttcctcctatgagtgcagttgcccttttttttggcgggagattcccagaacttcctccaaggttggtagcattattaagtgttaagttattttaactccctcaatgcccaaacaacaggatactgctttagggaataattaagtaccagggtcttcaatttcaatttactgaagtaaggaagttgcagagagaaatttgagaataaattcaaagttgctactgagctcgaataatgaacatggcatgaattaataactccagtattgtcaggggtgcaagagagagaagactgaaacacaccccggagcgagtcttctcgggaagaggtcaagggtcagaaggtgttcattgcaaataagaacaggtaggttgccgtattaagtatattcacatatattattcataactattatactatatatgtcttctcttcattgtataaattaaataactgtagctaattaattgttattacttatccccatagtttgcctagatcagatatattttctgagcatctacttactttatgacttccactgtactaggcactttggagagggggaagaatcatatcagacatgactcttgcctcagggagtttacaatccagctgggaagaataggcaattttaacagaaaagagaaacttgttcagagctagattacatggtactagtcatgagtataataaaagtttaaagaagagacaaagtaggtgaggtattttggccacagagcgtgcaggaaatgggacttgagctggacacagaactgcaggaaggaggaggtgggaggaggtggtaaagagagcagaggagtccgcatcgctcgattgagggtgaagtcccagagaggactgagcagtgggctttggcggatactgcaaaggcctgctgggttgaggcagagccttgtttctgccaagtcctgtgttaggctctggggacacaaatgggtaagacattgtgctaccctcaggggacttagagcctcttgcggccattctcaatctatgtgcctttccactggaataaaaatttttttgcaccgaattcaaggaactcagtccctctgaagcccatcaattgatcctttggctcaaggttaagaactgctgcctcatgggaatgtgggccataagtttaaggtgggctggtttgcaggggtgaggtaaggacacttagaatcctggcaaaggagtttgactgacataggaggcaacaggggtcctttgaaaagacctatagagaacgttagagatgggccattgtccatccacctcattcttaggtggggaaactgagatcccagggctgaggtcactgcccaagctccccaagttgttcctaggggttcttttttatccttagcttaatggaaacttcttgcttggatctgactttctcaggaattattagggtggcagcaaagggtgcaagatgaaaaactgacctatgttaacgtatccttatcagagatgcaccgagaacaatcggagcagtaagagaaaaggagaatttaggaagaagctaagaacaaaggatggagccactggcgtgaaagaaactctatcaaatccagttttaatgcaaatcgctgttggcacatgagacacttcttagtgagaaacctcttcttgaattttgcgataaagcagagaatctttgcaatctttgaaacctttcactttggaaatatccacaaaacaaatgggaaaaacaaacattaatgaggcagatataaaacactttggagaaaaaataatttagcatttttatagttgctatagaaacacctcagccctcactcgtgctaattagttggattttacacattttatatttggaaatgcaaatcagttttcataaattattacttatttttcatttatatttgcagtactgttatgcaggtatacacagaaagtctaggatattatttagttatataatgtgacacacttagttatatgagcccgacatttatatccacaagacatttcttagtttaaatattctcctgttaaatgttgtgggaaattatacagagatttagaatttttacagaagaaaatgtaaattatgtggtggcttactaaagggctttctcatggagtcttgggagagaaggggaggagttttacccccagtagactttaataaacatttaaaaacttttctctggtcgtgggaattatggttggtttgggtgtcttctgaacttttggtactaaacatttgccatctgtaaacacttactggacttacaatgattggagaagacacaggcatgtttgtagcaaagggaatataggacagctccaagatccggggcggcttatagtctttgcggaggaggtgagtgaatgctcagactcagtagatggcaattatagacatattttcagtttatagacagaagacaggaggagtgaagctgtggacttcagctttgttgttgaaaaggggtactctgtgacagacctgggttcaactcttagcgctgttacttactagctacgtgatttggggcaaattacttggccactccaatcctgttcctgtaaaatggaggcaaaaagaataattcttacatcatagagtttttgtaaggattaaatgatagaatatttattaagcatttggttcagggcccagtacattataaagtgcttagccagtgttagctgttataaaattatcatcacagtcgattctcactgtgcatgcaattatccttctgatttcaactatgtgtgctggaacaaaaaattaaaaaagagaaaagaatgctaagaatagtttaaataatgttcttcatacactcactgtgtatctgcctcctagtgagcccaaaatgtaaataggctggtgatcagacctttgtatatagatgttaatgctcaaggttgcaaacgcatgcatactgcactctatgtgtagtttcagggatttgcaaagattttttagactttctgaagttttatcttataccctgacttgagacactaactcccacatcatagttgaagccactgttgttggtgtgttgatagtgttactattggcttgatgtgaaagaacaaatagggtagctgatggagtgactggaagctacagttgagaccttggattagatctagatgtccttggatgattttgataaggagagaaaacagttagtggggagaagtggtgaaagatccttaaatgtccagtgtgagggagagagagaagagggggtggggttagcgatgggaggtgttgggaggggccatggctccttgcccaggaggctggggcagggacgggggagacaggaaatgggcctctgagtaatgggagccgcagagagaccgactgggtgcttagccccatgtgggaaataagcaacacagggagaaagaagtttatacaggcactagtatttttagagactgtcctttcagtgatgcatttgaataacaaggtgtcctaatactccttagccttctcagtcttatgtcttcagttatttgaaaaacaaagtaaatagcatagcttccttccctaggctgatttccgtcttttcctgaatcagtaagcaaggatttgtttcttctttgtgtgtatgaccccatttaaattcagagttcatggtaacataaatggtaactggtaggaaaacaaataaagtacaaatgcataaatacatttctttttcaaaatttatcacattaaacaagccaatagttttgatgttatctccacaaggttgagaccttgctatttattagacctactgggatatgtccaggcaggaaatgtaaggtactgaaggaatgggggttgagagagatggcaagctggaagccagtgtgccttctaatgggaagagctgaggctcattctcagttctctctgctccgttgctgttggagaatttgaacccagggttatcagatatgattttttgatagaagccagaaggtattttattgtgaaatcagattttaagtgatggcaactaattttcaaaaatttaaatcactatgaaagcaaaacaaaattagtctgtgagttgctggtttgtcaactttcttttatagctgcagggtagctagatgtggttattgagcactggagaagtagccagcacagattgagatacgcattagatataaaatacacactgatgttggaatattatgaaaagcatcaataatcattaatattgcttacatgtcaaaataatatttcggatatcatgggttaaataaaacattgctgaaattaattttacttggttattttctctttttaaaatgtggcaatcagaacattttgaattacatgtgtgacttgtattatatttctggtggactcactgctctagagaatttgagctgggtttttcctctaaggtcatctctcaaagtgtgtttgtgattttctgtgggtgaaggaccatgaacttatctacttgtcctttcttccttcttagaccaacctaaggtcaagaaaggtctgtcttttggggggccctccagccgggtcagttttgatccaaggatagagctaaagatggatctcacgctttgagctcaggtttcgattggctagtcagtgtatgcccagctgtcctcacccaagtgccagtaatgatgaccctgacacctggcattgcagtcataggcatggagtccttggtgcctaggttcttcagaaggcgtggcaaattcctgggaatcacacttcttttgtttgccgtcattttgcttaaaatcttattttctattagatgaaaaagagcaagcacctaaaatttcctatcatcgttatcattggagtcacattttaactcacattttgagttaaattgaggcccacattttaattgattcaagtctttcaagcctcacctcaagaagtttaatttatgagagagcaattccgaaaggcaagagggtggtaaccagtctgaggggccatagctgaaaaaaacaacttggaaagatgggaagccactggccaagttcttctcttcagcttttcagagaacacagtgtgtttgtagatctcatcaagcaagctctagattcaagtccaggaaatgttattgctttactttctagggactaggttctgtatggaatgtttgtacagacatcacctcttttaattctcacctcatgaaacacatctagtaacctctactgaggttttatgtgcttaatcttaagagaggcaaggaggaacacttgacagtctctacccacctccagacatgctaaggatttaacaattttcttaaagacaggatagttagagtgcccagatatgggcatatggattttccttttgttcctttctttggtccagctcagtggtgctcaaattttagtaggctgtaaacacaaatccacatgtgtggtgttttatgggtaatctaagtgattttcaagggtagttttgactacacgtgatttttgcttttcaggctaagtctaggacccgactttgtggctaaatggaactcgtttaaatgtgtacaagttcttagagcacaactccaggtggttggacacaaagatgcggaccgtatagccactgtccccagtgcttacagaataatgtgtgttcttcatgtgggctttggtgggatggggagaaaacccactgaagtttaaatagtctcagtgttcctgaagttaaggagcagaggtctggcctggcatggggaggcattctttggaaatggaggtggcagcagacaggcatcctgaagagaacagcccggcccaagacaacttcccagcctgaggttcaggtcctccaggtatttggcttcacttcagccacgctcaccttatctctagaagttgcttcaagatcagctccaagctgagttcctgcagcttccaagagtgtcagttatgaggccctcaaccttaagtatagctggatgttggagcttcctggttgttgcagggaatacagtgaaattcatccatttagtgggagttcaccatgagttctgttgtgcgaggaacttagtggcagtagctgacattgagggtttatgatatgccagggactgtgctacatattaaagttacatcctattacatttaattcatgcaatactctgaggtaggttttactcatcctctttcacggattagaaaattgagagagattaaatcatttgctcagtgttccatgcctttctttaggtgactgcatcagccatagttagattcggctgcaagtgagggagcctctggccctacccaaaacaaaacaagagtggcctaaataaggcagaagtttattactctcacataaattaagcctggaagtaagcagcctagacctgaggtggaagctctttcccccaaagccctccagccaggttccctctagcatattcttctgccatccctagagggtggtctcatccctgttctccaagatggagctgtagccattacagcaatattcctagcagcagaatggaggaaggaaaggggcagggcagacccttcctcttaatgatacggcttgcatattacagatagcaccctgctttcatctcattggccaggaattggtcacatggttacctagctttaaggaagtttgagaaatacagtttttattatgggcagccatgtactcaaataaacattgaggatgttataacttcatatgaaagagcaaagagatatttggggtcagcaatagaccttgtcaccatagtgactttgggcaagtcacttagattcctcttgctttttcatctataaaatgaaaatgatgattacttgttctcacttgtgcctcataacactcctggagttaggataactctagttaggggtgtcatgaggagtaagtgagactttggaaagcatttagcataatgtcctatagttggcatcatttaaaacatagctctttttaattaaaacatggcaaagccttccgtatttctgttaattttggggacatggtaacatagtcactagagaaacatgcttgctttctatattttctccttcgtgatctgttttcactattaaataatactttggaatcttctgcctgccatgtaactttagtttaatatctatttttctgtcaggctgaggtggtaagattcactgatcatgaaattttaaaagtttgaagaagaaataataaaagataatgttgactttctttctctttctgttgatactctcacagatggttcctttctctgtagaactcaattttatgttgtgtgcttaggaagcccaatgttgatgtaactataatttaaaataatttggaacttaccctttaaaggagtgggctaattgggaaatttcacatctggatctatatttatatctatccaggttaccactgttttagattggcttaggagagaggcatactttttcagccagaagttggaactcttctttggagcgctgaaaagtggtgttaaaattgaacacctttgcttgggaggagtgtgagctggaaggataggtgtgcatgggacagagagtgttatgccttcagtttggatcagtctcaaggtgttagtacagccgatagggatgggtgggggtgttaagctaaagtccttattggtttcccactggatgaacccatctggatcagtctccactgcaccaccacagggctccagtggtctgatcttctgcctcaccagcctcagcctggatctcaggcacagcattgtgggccctccagcctcattcatgctccctgtaccttggggtccttctgcaattggacccctctacctggagtgccttccttgcctctctgcctcttcaagtgttcctcgtccttcagatgctatttccaggaaagcctctctgagttcctgagttgtcaggcttctttgttttcactcttataacactgggcctgtgtccttcagagacatgcctagagtcctcttaggagactatttgattcatgcctgcctcctttagtctgtaagctcactgagggcagggcctgtgtctgcttttgctgaccttcttgttccctgtgcttgccgtggtgcttcacaaatatccgcagaataaaccaatttgaaaattcatatattacttatggatcatcctctggtaacttagaagggctgctcaaaaaggactttaatataaatatatatttaaagcttagcagttgcatgatgggcacactggtttgccagggctgccataacaaagtaccacagaccaggtggcctaaacagcagaaatctatttcctcacacttctagaggccagaggtctgagatcaaagtgctgttagggttggtttcttctgagggcctctttccttggctcgtagacgccgtcttcttccagtgcctttgcatggtcttcccctgggcatgtctgtgttttaatgtcttcctcttataaggacaccagtcatattggattaaggcccaccccaatgaccttatttaattttaatgacctctttaaagaccctgtctccaaggctgggtgcagtggcttatgcttataattccagcactttgggttgccaagttgggaggattgcctgaggctaggagtttgagaccaacctggccaacatggcgaaaccctttctctacaaaactctacaaaaaaaaagtacaaaaattagcagagcatagtggcttgcctgtagtcccagctactcaggaggctgaagtgagaggattgcttgagcctgggaggttgaggatgcagtgagctgagatctcaccactgcactccatccagcctgggtgacagagtgagaccctgtctaaaaaaagaaaaaaaaaaagactctccaaatacagtcacattctgaggtactgggggttaggacttcaacatatgaattttggagtggaatgggacacaattcagcccatggcagtggccatgattagactcttaactaatatggaagccaaatgttcttcaaatcacatgtcagcattttcttttcttttcttttcttttttcttttttttttttgagacagagtctgtctctgttgccaggcgagaatgcagtggcgcgatctcagctcactgcaatctccgcctcctgggttcaagccattctcctgcctcagcctcccgagtagctgggattacaggcgcgtgccaccacacccagctaatttatgtatttttagtagagatggggtttcaccatgttggccaggttggtcttgaactctggaccttgtgatccgcctgccttggcctcccaaagtgctgggattacaggcgtgagtcactgcacccggccacatgtcagcattttctaagcagagaccagggtcattgcagtaaggtctctcttggttagagtgatgcaaagccaagtggcttccgaatgacacagcaagaaagtcaaagaaaaggctccacaaaggctatgtgggccacattaaagcgcaagatttattttcattatattttttcttagcagaacccatcttatctggttagacaggcttctttagaaccagattttgttctttgtgacatttggagttaatatgaggaaatgctctttgtattgcccagtattgaaaatgtcagtaaacaaacgcagcagtcagagaagggggggttctaacaaaagacattgtttcttgatgcaggaggtaacaagagtatttagaacaaaggttttctcaaaataggctttttagcaaactttggagccctgctctggtaccccacccgcttccattctgctgaaacagcgatgttgatgaaaatacttattattttaaccagccccccaaacttaccaacacaaacacactcttaatttcagggctgacagcagggctgggaaggtccttataggatcgcaaaacaactcgggcagttgagggcttccggcagccagctaacaaaaatatactctcagaggatgcagctcagggaggcgtgggacctgcacagcagagagcctgaaagctggcctttccgttttttacagagcttcacccttcacatctggcggagctgtgacaatcagtgttagaccattttagaaatcagataccctgggtaccaggaagttgatttgccttcaacttccttaagaaaacacgcattaatatttaagctgggttttcataaaagaagcgttgtgcttgagatgtgaaataaagttaggcggctgggaaaactcctccagatacggtgaccctgatgcaattcaaatcacactccagatttgaaaaggaaagggagcagggctcaccctccccgcaaagtctttgtggcattttgtatctactgttttatggtgtgtgtctataatttgcaaggaactggactttaagttgtaacttccttctctgtaaacagaagttggagattcacgaaggttactttcttaagtgatcccaaaaaacactgtttatgatttccccttggtattgtttctttgcagcttttttcaattaaagagccctgtggcgtacatcatctcgttacggggctcatggaggctcttgctgtacaggtccagccttatgcgtttccctgccctcctttggatctactccctgtggagctgacattgagatggtgtcagataaatcaggcaggacaattctgatggtgccatcttgaatgtagtgtgactttagtatgtctctaaaagagttgtggagacaaatacagttcttaaagggcgaaagagctttttcaaagatcagtataaatggtttactttaaaaataaacattttaaatcactttgatcttagctgtccaaaagatgcaaactagtcatgcttctgggggggagtattttccggggttttaaacctagcatagaccatttcctctttgtttgcaaaaagataaataatttttggaacaatagaacacagaagaagcaattgtgtaaatagtggacaggtaatatactgaaggtgttgcaagagcagaaattggttttgcatttgcccatagagcttttggtaacctctgtaggtaaggttatttatccagatcagaattctgcaaactacattcctctgtctgtgtctgtccaccctcctactcatctccatctcatctgcgaggatatcgtgactttttttggtcagataccttattgaaaatttgcccatgacttagcataacttctgtcttttgtttcaataattagactttactctttcgggctgtatactttcatgctcacctggcatcatcattcaaatatgatttcagcattagcttagtacttaagtgtcaagcctgtatttggtattttggtacaatggttaatattttgaggattgcctgaattttagattttgagtaagtcatacataattgcaaagggagtaagttctgatgcactttcaaaatctaaccacaaattatgcagagataaaatgaaataattttgaggttttccacgtttcttttgcatgaaaaaacaagtgtcagctatgctaatatcacgtactatatcatctttaatttatttttgctttttttttttttttgagatggggtcttgctctcttgcccaggctggagtgcagatctcagctcactgcagcctggacttccttggctcaagggactctcctgcctcagcctcctgagtagctgggactacaggtgtgcaccaccgtgcccagctaattttttttgcttgttttttgtgtgatgtctaaaatagttatctcctggataacaggaagttgtcctcagtaagtctgccatctttttcgtattcatagtatgaattctcactctaaagtttaaggagacatgatcatttacaaagatactttaagaccagggctggcatagtaaagaaagtgtgatattttattgttaactggcttctagtggcatttcttaaacgaggctcttttgtcaagttccacacaatcacgaggttgagggtaggttttgaaggaggaaatactgtgcaagacaatttgggtagttctgtgtgggtctcttaacactataaaacaattaacagaaaacatgcgctctttgttggacagacagaaccacaaagtggacacaggattatctgaatgaagacatctgagttttaatatgagatcttcaactaacaagctgtgtgactttaggcaagacttctaacttttctggggggttttctccttcataaattaaaaagggcttggcttgacatcaagttaaaaatataattaaagtaaataaaagcagagctcctgtagttgaggagagcatgaggctgggagagctttccactggctgagcttccccctggccaaggtcaaaatcacctcctacttccagcatcttacattccttgagtctaaaagagataatgttaattagaatttaaactgataaaagccattttgacatttttaaagtgtccctttgctaatattacttgttatagaggacttggaaaatatgaaaatgtttaggctgggcgcggtggctcacacctgtaatcccagcactttgggaggccaaggtgggcgaatcacgtcaggtcaggagtttgagaccagcctggtcaacatggtgaaaccttgtctctactaaaaatacaacaacaacaaaaaaattagccgggcgtggtggtgcatacctagaatcccaactacttgggaggctgaggcgggagaatcgttgaagcccaggaggctgaggctgcagtgagtccagattgtgccactgctgtccagcctgccttcataacagagcaagactctgtcttaaaaaaaaaaaaaaagaaaagaaaaagaaaagaaaacgtttaaaaaggagaccaaaatgatttattcacaccaactcccagataaatgcatttgaggtgtattttctctttttcttttattttctttcatatcagtctcctcatctgtttgttaactaaagtgtgtgtgtgtgtgatttttaaaaagatcctcgctattggatattttagttatttccagtttttcatggttataaatatcatgtgatgaacacctttgaatataaatcttcaactgttgctctgattacaatcttagaatagatttctagacatggaattcctgggtcaaaagtttgacttcttaaacttctagtgatctcattttattttacttttttttggtaccacttgtttcaatagaaataatctcttattcttacacatggaaccatgatgagttgttcagactgttaggtgaaatagtattgaagagtagtgaacctgaagcagctcttacatgctagcaaataaaatctatctcccacatcatgattaaatggatcattgttcacttggtatgctatggtagaaagctgctttccaatttggagaaaataacttgtaaaatcaattttaacatttgttgggtgactgggatctatctggttgctaagatttttctttccttcatatctcatgatacttaactttggtttaaacaaatagaacttatgtgtttctaacacccctcatttctgaactcctatttttgaaaaaaaaaattggaactgtgcattttggtggagggggagagaataaatgcatatttaaggtatgaatgcttctttcaggaattgatctgcatcttggctggcaaatctctcaggtgcacgaaggggccctggctacttggtcattcatggaggaatatattttttaaatgctttcttgaccctcttctaatttggaggcaagcacattcctcactttttcccaaccagagcgaaccaaattttcatgtgcacagagtgtgttttcagtggattagacccaaagctatgttgttctagaggtcttagaactgcttatgtagtacacaataagctttgtagcacaatttaaatgttgattttaacatataaacagtcatccaaaagcattccagaaaagctgtttttaggatttggcttaaaagtgtattggataatgacttctcaagcatgtttattttttttggtgtctttatttaggcatataaagtttttccttttactgggaccccataaagaagtctgtgtcccctttttttctctctctgtgcttcttcctttcctttcccagctgttcctttaattcatctgagacattagatgacattctttattttgccaacaatgacttatttataactaattgcctgggttctgggattgttaggaaactgtattgacaatgataatttttagttgtctcacaatgaggacacatgaattatcacagattccaatcaaaaaatggcaaatgagaaacaaagcccccaccaacggtacatttctgacattgcctttgttaagtgttgcattaataggaaggtgacattcttttgagaagtaaagcatatgtaaataggaagagtttttaaaaatagaattcttcaagccagactcatttctacagcttcataaggaaaagaacaagttagacagaaaccttctgttaacagagaatagaaattggagttgttctcctgctttatttatggaccaaactttttatgttttgagtatttttgggtatagttgggtataattaagtgtggtctgaccaatcaattctgtgtttaaatttcatcattagtgagaacccaagagattcccaggctttttttttttttttttttttttttttttaacatggctatgattggttatatgagtttgtgaaattacaaacctaatttctgggtggtgtcaaagatgggattacctgaaacggattcccacgttgctttgtgatttggtgattatggttcttgacttctctaagagaggaataaaagtgccacactcactaatgaccaaattggtcagttccactcatatgccccctatagcctctttaccatctagcctttccagagttaacctattgtaaaattagattgtaaaaatggacagagtggccaccactctgggataagggtgaaggactcatggtgtcatccccactaaatactccagtggaaattatcacttaattatttgtgatatcacccagctccccaaagagctggccttccttttcagccccagttatcttttggaagtgtaactctttcagtttgattgtcctgggaacacatgcagttttctcttgatggggaaacccctctctgaaggtctgcgttttaagtggcagagatgcaaaaacagccttctagacagagtttctaattgaattctcctctataccgttatccataaactgagtaatgcatccaaggaagaagagaggatgagagaggtcaggaagtttagattccagtaaaatttaaatagccactgaatttgccatagcaaaacatgagctatgattctgttagtacacaggaaaagtcaattaggtgaactgattttttatggtgttgggaatattataattcagggattcttaacctatagcttaacctataggcaatttaagactagatttcaggggtagggcagtgaaacttctaaaattgctgtaacattttttattaagtcataggcagtttcctagggagaggcttttatcaaattctcagaagggtccactgccataaaagattaaggaaccactgcattctatcatcataattttttgtcttctttcaaaagttgatattctggttttttttatgcagaaaagacaaaagcatgtacaactctgatatttcatgatctttaatttcttccccctcctggatgtcctataataaatgtacaggaaagaaatataaaacgctatccaaactcagttaatagctctgagaaatgcacactcagagtgctttaaaatcaggttacaaatatcattttcaatttgctggggagaaaataggaagagtcccttggaatacagaataaattcattctatgtacattatcagtgttggttcattatattctcattggcccacaactcaacacatctttaagaagcaaaagtgcatacactctcccttactgacaatatttaggggaagaccacatactttgtgaactactgtgagttgagttcttgtagtcaaagcagtagtaggtggagcttcattctctggtattaaaatcctaaaagtgagtagtgttattaattgggggcacttttgagatttgattaagaaatttactgctcttgtgggttgtttcctcccttgtgggatgttctggatgaatgtcaaggtctagccccggcagattccagaaagcttgtccatctaaatttgctgttaagccatgggaacttttctattgcagtctttgggtcatggtaacgtgtaaagcctagagtttgttgaagggcacttttctctctctaaaattctccattcctcacaactggtttttattattccgtgacatgctgggagtgttgctatgactgtttgagaagtatgggcagatatattgctggctggcttcttacaggaagagtttcccatgatggtaagtctggctgtaaatttcaagcagcattgccacttccacctcaagcttatcaagactcttagccttccttcaccatgaagaatccaggatcttatcacctgaagctattgagataatgtgacattcagtggatgcagagacttccagagcacagttccctacttggcagctagtagggaaacatggaattcattatagaacaagctaagcagttgtaaattgaaatatggcagcaataactacctttctactcagtgactctgaaagactttgattatctacctacctacctacctacctacctacctacctactacctctctgtctttttggtttgctactttatagcaaaatgatagtgttctggaaagacccgaattctggtcccaggtcctgtaagtcagagctgttgaaccttaagatagtcctgtagcctccctggactttgtttttcttatctgtaaaaggaacataatagtatgtgctttgctgacttaatatagtcagagtgaggaggaaatgagacctcaaatttgatatcactgagaagcagtttttttttttttttttggagatggagtctcgctcttgtcacccaggcgggagagcagtggtgtgatcttggatcactgcaacctctgcctttgggttcaagtgattctcctgcctcagcctcctaagtagctgggattacaggcacctgccaccatgcctggctaatttttgtatttttagtagagacggggtttcaccatgttgcccaggctggtctcaaacttccaacttcaagtgatccgcccaccttggcctcccaatgtgctgggatttcagctgtgaggcactgtgcccagcccactgagaagcattttaaagccaaatgatgattgccattttccttgatagaaattctcccaacattttagtgtctcacagttctggctttgcagtcaggcagggctgggtgagaaccctgactacaccacttactcatccatgatctcaaaggagccacttgtgtaatcttagctccatcttcctcatctttagaacgggagcagtgatagatcacacctactagagctgaagtgtggattgagccaggtgagattcatgaagtttgagcacatggcttgtgggcatgtgctcagtcctcaatgaatgtaagctgttgtcacgctttgagtccctctgcctatattgctaagaattagaacattctgaaaacagatccgtgcatatgtgctctaagaatgcacaatacacaggcaagctgtcattttaagaggaaatcatccaaggtcttctggttagtcctcaataatcaccttctattacaatcagattaaatcttcaagtggtggcagaatgccagtttttttttttttttcctgcagttgtgtttcctgtgccttctagtggtattcaaaatacttcacaattcaactcaagaaatttagcacatcttcagaataaattattattgtcattagcacattaccacccaagaaaatctgtacaggaacagaatgcccagagtgagacactgcatgttcatcagcttgtgggtgccatatgtatggggatgtttttgtttcggctgttgctttttgtacaccaaagctaaaagcaagacacacccagtgatgtttgttgatcttgtgactaacagagttagcaaagagccaattaaagcagttcaaacagacagaaagataaagatgccagtgcagagaaaagtcacagcagcaataacccttgataaaagggcaaatggaaccaagatcttacctttcttgagcttatatatataaatgtatctggcagtagaagcatcccaaacttgcatcatgagtaaagagtgatcgaaaggaaaatctgttttgattattttcacaaaacttccttttgatgtgcaccgattttaatcaactttcctacacagctgcaaattagtcctctagctctccatccactctattgctttctttccttatgattcttgttacattttagtttagcacatgacagatcctttttactttacagatttccaaaggtgataatttcttacattttacatgactatgtatactaaagatgaagtactgctttcaagtacaattttaggtgcctatatggcttcatcctttgaatagcactccttcctccttttctatatatataaaaactatgtcagccttgaactcaaactaaaatttcttccattaaagggtatgttcattatttactgtaagatgaatgccctatggatttttaaacataagcctggaaaataggaaataattcactctggcttgaaaagggtggagatttctttgtttctttttatatttattcaggaaaagctgacaatcgtctcacattaatgaactacaccatcaatcactgtgttgacaatgagcggaaaagcgaggtatatgtcaggctaacggcatattgcctttttcagtgagggcatggctgtttatagcactttcattggcaaaatacttttgcactggaataggaatagaaaggagaattagaaaggcagccagtggaaagagctttatgttttcaaattatggaaaaagtaataggggaaaattgagaaatgattatttttgtactttgtgtacctatcccacaggacttgaagagtaaatggaaaatgaaaaaaaaaaaaaaaaggcttgggggagggtggtttcttttatttctcaccttattctactgggctgttgtctttccctaagatcatggcaaaaagtttcagagattatgtacaacaactgtattggaaccctgcaaccattacaaaattgaattagaagtaattggttttatgctactctgagcacccaccatagcttaaacacatacacacatgcgtgcacgcaggcacacacacacacaaacacacacacacgggtgataatgaaaaatactttggtggcctcaggaaatgatagaattttctcccatgtttagctcccactctcctgaggaacaggttggtaaggagattaactaagccctggtgaaatcactgtatcaaacaatattgtggtgaactgtgactcaggcttaacagctatgtggtcctatagcccctgagaggaggaaccttcatctgttttggggagggcactttatcctctccttaaaaatctaaacaactttagtgtcaacttaataagttggccaaaaaggacaagatgaaggtaatatcagaagctagcaattattagagggggttagtatgtgttaaggactcataacagccttgtgaggtgggggaatatcgtttcttttacagataagcaaactgaggctcagagggatgaaatgatttgcaccaggggtcacacagtcagtgaatggttgagtcataatttgtggatctttcttaactacagattccagtctcttcaatgctagaccagtgattttgaaatcttttggcctcagactcctttacacttttaaaaattgttgaagatttaaagaaattttgtggatgtggcttatgtctatccatatttactgtcttataaattaaaatgagaaattaaaaaaaatttctttcttactcatttaaaaataacaatagcaaccccatcacatgttaacataaacacagtttataatgataaaataactccatgttctgaaacaaaaacatttagttagaagaatggcatggttttacatttttacattgtctgacttttaatagaatacagtattctcatatttgcttctacattctgttcctggatgtcattttgattaaagtatatgaaggaaacccagcttcataaatatatatagttggaaaaaaagaggagtattttaattgttatttttcagatagctgtgactattcttctttgataccacaccaaaacttaacaagtttctcaaaagttagttgtgtgatacctgaaacaatatcaatgaattttttaactccttacattaaaatacattggtatatctttcactatgaataggtcttttacccatcatcattttgtaacatcactcattggtcatttgaaaaatattggttcactgagttatgttcattgagttatgtgacatactttgttagacaatatcaacgatttatgttcattaatatcaccattgatctcatcagaaaaggtattggagagctgccaatctcatagttgtggacccaggttttccaaaattctaatttttacttgaaaggtgaattttattattggcaacacctgctgtcaatagttttctttgaagtgacagtcttactttttgagaaaatgtttgcaatacacaagtttgaaaagccatagtttgtcagttgtattttcaagtaaaaatgctgttctatggaaaaatcaaaacaaaacagaaaataactacttcagcttgcaactcagacagttgcacaaatgctttatctggacatgaccattgtactttttggtatgcagtgaaaagctttatctgtattactcattttatcattttatctcaaagaatactacgaagatgtaaggagggtcaagatttaataaaatttaatatttaaaaaagtttaataaaattagtagttttattacttcaacaacattcttaaatgaagtggctttgatgctttgtgtttgtgtgtgtgtgtgtctgtactgcaagtgtgtgatggagaagaatacaatgattagtgagtacggtttggcatgattgccatgattttcacaaggcatgaattgcttcatctatcattgcttttgcaccttcagcacaaatgtcaggtcagtagtattataaggaaaatagttttcaccccatggcccataaaagagactcagagacattcagatttctgcaggagcacatttgagaactgctgctccacacaatactgtctctcaaaaatgccagtgatggatgtatcaacagctttctgtagcaaaacagcagaaaaagtgaacagtaggaaaagagttggataccattattcttacaataaagttttaatgcttatttttctatatgtatgtctgtctgtaatggtggatagaggcttcgttaaaatgtcagtaggtttttatttcttattgaatctttgtgcttcatttcaaagaagaaagaaaaaaatacactacggatcagtggatagcataattttgagaccatcagcaactgctgaacttagttttcatttttaccatgtcaacattggaacacactgatcagttctctgtttataatcctgaaaacttgccacttggaatagatttaaaatatttgtgtatagttacagcattttaagaggcaaaacccaccaatttctcacaaatgcttggaaagctttctgttctctaactgaaaacatctcatgttcccgcttagccaagagagagaaaaagatttgaagacagatcctttaactggatgtaaggagttctctaaaagacttaacaacttattcgaaagtagtttgtcttaaagaagaaacctgtcttggttgaagtgaagaaaatttgggatttttatggaaactaattataagtactaatgcttttgaagttatgtctccgttgcttggaacaactattggtcacattttctgtttttggggcattatacactcttaggaattgccagtgtttcaggctgcagcatagcttcatcccagagtggagtctctgggtaagagccatcaatatggctttcattctgtttctttttctgtcagatttttttttttctttcaaagagaaaatgaaacacaaaaactcttgtgtgtgcttgaggttcattcactgcaatttgagaagtgtggtattcggactgaacctttgaagcttccatgacagagaaatgctttgggtgtaggcactaaactcttcaggttgtgggtatttttcagtactaggtgaaaagcatacataatatacatcgcgatccggcacagttggggaatcaaagatctgtttgatcaagtcaatagcacttcccaaagtgtggtaagctaccagtaaaagcaccggtgctggcctgtgagatgatttcaggagatacacaggcattttgaatttaataattatatgcctacttttgtgcttcccttcagttgaatggttttctacatatagtttccttttagaataattttgctgaaaatagctagtcaatttaaagaaaagttattaagtaaatgacaataagggcggtaggtgggttggtaaaatgatagacaaatgattgaagttttcggaagctgaagtagttcagacacttagtgcattcatttgcttattcaacgttatgtatcgaatacctgtctattccagattctgtggattcaggcagtcaatagtgggaacaaagtccctggccttgtggaactctcatcctcgatgtggaagagaaataaatatatgctataatctcaggtagttagtgtcgtaaaggaaaataaggcagggttaggggctagagcttgcggagtaggggcagttttagagaagggtggaggaaagccttgtcgaggaggttgcatctgagcagaaagcaagacagattgggtttagttcattctgcaatcacacatggggtgtttggctctggaaaacaaatacagaaaagactggccagaagaagctcataatttgggggtggaggacttcattaaaatttaataagatagagtatagtgaaagcgatgcaaggaggagacattgggagcatggaaaaaaggaatggctgtcctaattgatgggaggtaatatgatggaagatttcctagaggaggtcagtgtcctgaattgagcctttcagaatgaggaggaggtagcaggggaggggaaggaaatggtggcaggacagggccatttacagtagagagaacaacatatgcaaaggtataaaacattccttgagggggcacatagtgggtatctggtaaattcctgttgaatgcaaaaatgatgtgaggagtgctttgacgctgcaagaacatgagcgttgaggtaaggagtagagggagagcctgctgtagagctagcaaaggcctgtgtctgggaggcttggacttcttcctttgggccacagggatccactggagggttttacaagagggatgacatgttacatgtgcttcattcattaactactattgtgttagtttggagaataaatttgcatggcgtaaggacaagcaccagtgaaaatcaggaatggattcaacaagacccagaaagaagtaatgggaagaaaagagctatagggagtcagttggatttggcagaatgggcatcattggtgaatttaaagcagcttaatttatgcattgagggtagaatctggattttggggaattgaggagtagacggaggataaacaactctatgtatgtggattagcaatttttagataactggaaactgcaaaatatttaatacttagctacgtagaatgtgaagtatttattcggaatggggctgaatgtccagcactgctcacagacccagttcaagggtcctccgcctggcctctgctctttagagggtcccagtctggctctcctcagggagtgagagacccctggggccacctggaaactgcccactcttgtaagatgttgctcagcgttcttgggacccaggaattcactgctccaaaggccctgagttcactttcaaggcttggttctgcagggtgtactcatgtgtgcaccctgagtcttgaggagtagacaaagggcttttgtggaggatgaggagggagattggatgtgagcactgctgtgttcatacgtgtgctgtgttctgatccttgagatttggatcagagccagaggtggaaagagaagaggatggggtgtagttggggctggcctccctatgccactgactacttgagaggaacattgaagaactgaaaattctacaatcgaagttggctttccaggttgttataaagaagtatttgtcaagacaggaggtataacatatttcatttaaaagtttgctagcttgttttatagcttttaaatatttagacacgtaagatgtgagccttcttttattaggaatgggcttgagtatcataattccttgcatttgttgtctttaaactagaaactcagtaataaatggtagaagtgtccagttcctgtaaggctgcttaagtggatttttactaaatattaagtgttttcaagaaattgtgttaagattcgcctcactttccaccaatactacatgtctttggcctccccacaaccttagaaatgtacacccagaactgaattaagtaatttagaataagctcacattttaaagttactttcagaaaccaaatttgaagaaagtgaaacaatatcctttgccccttacttctgggtaaaagacagaaatcacaactgtccaaatctagacaacaatctttatggttaacttataaagtgagagttagttaaaaatttcataaaaattagagaaaattgtagcaaagccatcactaatttacccaggaagtatattaagacattacatgcttacaagttatttataaagtcccggacatgtttgttgatctggttaaaacaacactaagtacttccagaaaaattcctttctagataaaaagatctgataaatcagcatgatcatcagatttctctaataaaagaaagggtgttggaaagagtgaattccagataagtcctgtgtaatgctcctgaaagccatgaggtcaccagtaaattaaagttggatttggggcccagaatctgttatagctgtttgtattctcctaggctggaggccagacagctagaaacagggccgagatcctcagggagtctaagtcctcttcatgcagcacttgacaccgttattgcacctctggaatctagtaggtttcactaatatgttttggggggctctgcacgtcatgtgataaaattgcattgcgagtctgtgaccgaagatgagatcatctttcttagctcatcgtttcaggcaagggccaccctccccataggtggagtagcacagagtgcactgtgatatgaagaaagaaggaactgagatttttatcatgcagtgatcctgtgccaggcagggtgctgggttctttcttaaatcatccagttaatccttacaatgaccctgtaagaaggtcggagagggtaaggcatatatccaagctcacagagcttaacaaatggcagatcctggagtcattctgctctccacaggatgccctgttcggggctttttcctcaacaccacactgaggggtgtcaagagcctctcttgcactggaagattatttagctttttagactcaggactcagaagagccttggagattatatagtcaccgaatcctgacacctgtgcatttgctgctgaattcacagcagttctaagccaagcatatgagcgtccccctagcattgatctgctactgtgcctaaaagtttcccctgcagtgactattccacatgaaaccattgtgccttgttaaataaaatatgactgtatcatgaagacaccaccaatacttaggttcaggtgattttatgccactagtaagaatccaaggacaatgtgttattggggagaagtagaaaaaggaaaatctggggtagcacctggcatgctctttctccaattttctactacttactcctattccccaaattctcccatcaaggaggaaatgaactctgagacagaagatgagttttcctcaaagcttgaccaggatataagtggatgccttattgggcaaagcagagggtaaccaattagaaggccctggcttctcttgattgatagctgagaactcgtcagagggatcagtgctttctctgtgtattgctggagtctgaaagtgtgactctcatgtcactgattcatttctgaagtgttaaattcagaataaatttttgataatcaaaatgaacttagagaactttgttgtttggcattgtcaagagtgaagaattcttgcctaatgcaaaaagtcatccatgaattttctgccatattagtttgagcaaaactgtgttttttgccctactggatctcttaatgtaatgacatgtttgggattttgaggttgaaatgaatttctgataaaataaccattccaatgataaaatgtaaaatggtaatgcaagatcagtcactctcgttatgagacttctggctcatatgattataagtgttaaagccaggcaaaatcttaggcgtagagttccaagaaatattatactttactcaaaaggcgtgcaagggatgttccagagttgtcattagtagattatgatgtcaggtgacagctccgcaggttgtgtcactcttgcttatgttgtgttttcacagctccctttaacaagacacatttagacttagtggattttgtaagttgaaaggccccttgactctaagatcaagagttaaaagaggctgaggttggcttgcttgctgggtttgggcaaagccactgtacacagtacccaaataatatctggaatcagatcgctcattgtacttatagaaaattagagtgttctttggtctattcatattgttggagtttcccctttgtctttcctgggtggggaagttaaagaggaatctcacagttatttaagttggtgggatagagatgtagctcatgttgttctccttctgagacgcacccacctgcaggaaggggaatgattaacccaccacatgagggggtttggctgaggtgcaggaaccagcatagaatgagataggagaacccaagtaactcacccatcttcccacctgctgtgatgataactggggtcatttatccacaatgcttaaagtgacggagacaaccataggcatttgcaaattccttgtctgcctgcctatttacctaggacagacttacattttgacttgccctttcctccccagttggactggaatttgagatgttccatcagtctgtttaatcctttaggtctgaccatgatctgagatgaagtttgttccttggttttgcttttgctggtttgtgatcttggttctcgacttagacttggaaggctggacagagtcagagagattggcagtgataatctttacacgtgctttctccttatgtcattttacatttggagcaatcccttgaactcataggatgagtattgttagttccattttacagacaagaaaagaaggctcagagtagtgaaatgacttgccctttgagtagttgatgtctaactccaaatatttattccactattttctctactaatcatggtatttctcatcaccattgctatgcctgtgagtagaatttttatccctgttttcagagggaaaacactaggattttaagaaacttttcccccttgataatccatcgattcagtagttgtgccagataccaaccagagacctctttgtaggtcacactcaatccctaacaagtctaaaagaaacagggccaggcatggtggctcatgcctgtaatcctagcactttgggaggctgaggtgggtggattgcctgagctcaggaatttgagaccagcctgggcaacacagtgaaaccccatctctactaaaatacaaaaaaattagctgggtgtagcagcgtgcacctgtaatcccggctacttggaaggctaaggcaggagaatcgcttgagcccaggaggcggaggtgaaaccccatctctactaaaatacaaaaaaattagctgggtgtagcagcgtgcacctgtaatcccggctacttggaaggctaaggcaggagaatcgcttgagcccaggaggcggaggttgcagtgagccgagattgctccattgcactctagcctgggcaacagagcaagactccgtctcaaaaaaaaaaaaaaaaaaaaaaaaaaaaagaaagaaacagcagggctcttaatataccccttagtggagataaatcctataaaattacacttcagcagcaaaatagacaagcacagtaattttggtgtgaaatgtgcaaagtcttatttacagaacatctcatgatgctgttcccagatgtctttttaaagaaatttttagttacatgcaaaggaactgaaaaccaggaatataattggtaagaaacgtaaatctgtccaaaaaaaacaattgcaacaacttgatgagatatatattttctcagcatcagcataaaagaaagaacattctgatccagaaatggtatgtaagtaaataaactttaattggtttgacaatgccccttttcctggcagtgccaagaatcctagcattataattacacagttctgggcagacatgtggtttccattaagaaagacttgtgattgactgagttcatgaggcatgtcagaaaaaacacatcaatgtctttataagaagggaagagaaatggatctaaatgtatttataacttcacaagatacacattcatagtttcaaaagggcatacatttctttaattctgatgaaaaaaaaaaatcattagggaaagccattgagagcattttggcctccactgctacatgagcacagtacagtgacttgcatttaggtaaaaggaatactttttttttttttttcccttacaaggatttatttaaggattctggaaggcaaacgttgaggaaagtcttagttgaataagctgttgcttcatggtttaaacgttccccaacctccttttttcctttaaatggctttaccattaacaaaaagatttttcagatccgttctctcttagccccgtgtggtgagccaagcaggatttagtagtctatctcccctcaaccctaccaccatctcaactttttaatagaggaggagactgagtcttgggaagttggtgagttgctgaaggtcgttcagctaataaatgcttttaatttaaaatgtgttgcaaaaacattggagaggggtgaaatgggcaggcagggaggggctttgttcagctcttgcattgtgcaaatgccaacactccacaggtaacacagacacaacataagaaatggcttgaattttatatgcaaaaggataaaactagcttggttgaaaagggtgcatttcctccaagaacattttaaacaaaaacctaatgacttgccgtaatcacctaaagtgactaaaatattgaattgtttattttttgcttttgcataaatacttttaagatgacaaatacttttaggtctgccaaatactgtcatcttttggcaatgttaacatctcaggcttgatatattttcttgacagtgaacaattgtgtgtgcgcgcttcttcttttcttgaaaaacattttgtcaagaagtagtggcaaaacatgtggtagtgtttttaaagagactatctctacaaaggcatctcttacataaaatatgagactttttaatttaaaaaataaatttgctttattcaatggaatgtctaaagctgttttgtgattcagatatttttaagcaaccatctggtatgctagaatgaatatgaaaaatattgcagtctgaaattcatgaaacaatggcctatgatgtcatcaataataaaaataacaatgaatgatagcctccatttatcaagtgctttctatgtgccaggcattgtgctctgtggaacatatttctttaattctctcattagtgccaggggtagggattattaactctatttaacaaacgtagaaatcaaagttcagtagtgtattgctcaagatcacacagatagtacatagcagagcagggatttatgattccctcccttccctacgatgtctgttactctttctgcagttattggacgttgagacattgagcaggtcctatgactaaagctcagtgttgggatccattagtgtagttcttatataccagcttttgttatcaattggcccatgggtgctgagaaaaatggaaattgatgggtttaattgagattagcccatgtcttgagtgagattatctctgacagagaaactaagagagtaaagagcctcgacagatcacattataggaatagtagaattctgttatgagcctttgtctttttagttcttataaaaaagtgaaaacatatttatgcaattcccattaagagttactgtggataggaacagacaaggacaacaaggcacagggagactaagggacttgcttggtcacacagctggtttttacttgaattggggctggaaacaagactttctgacttggagcccagttctgtatggaatcacattagttttcaaagccaagcctggtgcttattttctgggattgtatgactgacatcacaataagagcttgtctttgtgtcattactctttggtatcacaaccttagttcaaggcctgtcttattgcagttgccttctaacttgactttctgcttaaaatagtctcctcctctaatccattcctccacactgcagctagggagatctttaaagtgcctcttctgttatgcctttctccagtgaagaagcttgagctggcttcacggagccaggattgctgaatgttgccccaaggccttcctggtaggaacccagaggctggtttccctgggatgtccccacagtgtgctccatcaccagcagaagagtgccatcctggtatcagggtggtgtttctctgcgttctttatgctgccccacctgcactttgactgaaccccttggtgccccaatcccatgtctagaatcattttcaccctgccgcaggaggttcacatttcgctccctctttgaagcttcctgatccgtctcttaatcaccccctccaatggtttctctgaagtgttgttgtgttttgtttgcatgtctcataacactcatcattttccatcttgtattctcgttgtcttttccatgttttattccccctgccaagactgcaagttcctgaagggccgtaccatctagagttttgcatagaaataatgcactccatagcacttagcaggggaggtcaggcagtcaacggatattgtctggaataagggaaggagtgagttatagcatgtcagacatgctgttataataaattaatatgtcttgaatgaatgaacacatgaatgaatggctgtgataggcacttgacctcttacagacttgagaaaggggagtaagagtgaaagttttgaagtcattactgctgatcctctctcctcatggccactctgctcttctgaccatgagctgggtttggagctgcacacaaacagaggaaggctttagtaagaaaagctgtgtccccgccaggtttctgtctgccttgatcacagggatgcctgcaattggttttaaatggtggtggattacactgatgtctgtgactaagcacttgtctgaggttttccaagagcctcaccatcactcgtatccatcatttgacatgaagaggtttgtgtttgctctccagtctgacaagaaattgtccatcatttggctcaggagcagcaatctcccaccctagcagcctgctttcaggcccgactgtgcattgtgttaaaaactaagcacagctctctgacctggggattgaagaggaggctttgcagaaagcccttcttctccaatttgttcttttctgtttcgtgctggaacaagagaggtacagactgtcgctgtccagctgctgtgatatggagggttgtcgctcaattaggtgttggaggtgggtgggaggatttgctgggtatcagacagccaggaagtcaacacacatctcctggtgtgccccagaggcctggaaacatgcatgacactgaaggacacgtcaacgatgttcctctggggcagagaagagggcctaagcctgcggtgggcaagaccagtggctgccaaagggttttctgttggaattatgcaggaactaattcaactggagataccagctgctgaatgaggcaaagagtgaaggcccctttgaaggtttaaaaaattcttttccctcctctctgtgttatttcactggctacactttgcaaaggctaagccagatggagagaaaaggagcaaaatatttgaagtagttatctctccttcgcatcagctaggggcaacctgaacaggctatgcacttcttgtcatatttatattattattgataagttcgggaagcagactcagaagaacaatgggcctatttaaagcatcttggaatcacatcagctgatacaatagcaaccctatcccctcaactcctcccttcaaagatagggtggtgggtgtattaggcagagtcctttggtttacaagcaatagaaactgactcttgacaacttaagcaaatggaaagggatttattggagagcttagaagtgagaggagttgaataaggaggtgttgggaagatgaggatgtgaggcagttctggggctgtggtgtagtcgctcaggatgctgcctggcagaggcctggactcctcctttttcctcccctaggtcccactcttctcaagagtcagcgtatagggaaagagtgagaatggcctgacatggttatcagtttccctaagaccatgaagaatggaccaggggcagtttacgaaaggaaaagtacaattacgaagagaagggggggcactgggcaggaaaaataacagacttccaccagaatgggccaggtccactgcggatggctggctcatagtttcttccgtctttgtgaccagaggtattcattcattcactcatccattccacctattttaagcacctactatgttccagataatgtgctagatgctgaaaatacagtatttaatattccagttgtctgtgttataaacggtgcttcagaaacagaggagctggggagagtggcctgttttctccacagtgctgctccagtgagccccggggggatgccattcccaatgctagtaaatggaggatacgcatagaaggggatctaggcctttgactttcctccttcagaaagtttccatattttactatctagccttggttgcaattgcttctagtaattttttcctataagtatttatctacataatttgcagtatattacttccagttcatttatgttacttcagaagagttcttatatctttttcctgggcagttagttgtgttgtgatccctgtgaaatgtctaggcacccacggacacatgtaatgcttctacttttagtggtcttccctatcccccacttcctccttggagtgtctaataactacaagaaaacacagggttatggagcctatgtctgtgtgaatttggacatcctctgaaccttttcctgccttcattctctcatctgtcatacaaggtaatccctgccctgcctacctccttgtattgttgggaggatcaaatgaaataatgggtattaaaaggctttgaaaaattaaaagtgttcttaaaccccaagggcttaagattctatggctgaaggctagagggcttaacatgaggaatgatgactctatagtaaagataatagaaaaataacaatagtggtgcaacttatctggggtttattatactccagacactatgcttggaatgcccacccagtagtggctgtaggagatactgatgctatctccatattacagatgaagaaactgaggctcagaaaagtaaaatagtttgcccaggggcttatggtttggtatatgcataagcctggattttaatgaatacatgtctactttatctctccaactagatgaatgaatgctgtccctgtctaactccctcatatttctcagatctgttagtgctagggttggaagctccacagcagatgtagggttaaaaatgtggaagctgaaattagacaacctcaacttcacatttgtctctgacacctcctagctgtgtgattgaagttgagttattcagtctctctgagcctcagattccttatgtgaaatggtggcaatagtagttccttattcataggtgtctttagcggaagtgcacatgcaaagttatagaaatagtaataataattactaatatttggttgaatgagtgattaaatttctaaactggggtccaggcaaagattatataaatctggccagcccaatgaaatgatagagattaaattcttaggaattttctctccccttcccccaacctcacaactgagaaaagtccacaaatgggtagcttcctaacttaatttggtcctcagatgcatttggcttggtcggcagaatattttttaagaatttgaatttgatgccaacatcatgaaatcaggcttcacattcaaatccatatatctggctgcttttataaaattggagaatgtataattatgggctcacatgcctgcccagcaatccccagctgttgctgagtatagctgctctctttacctggggatgcagcacttctgtgtgttcctgtaggcatttgagtttgaggcccctgcctgagaaacaccagagtcagcctaggaaacctaggggaggagatagaagtgactctttttaatcttaaaaaaagtctagtcctgaaattgtacctgttccccatttcatccaggacttgtcatcagcatttacttccacctattatactaagaagtagagagcagcacccgttgttgcagaccaaggaagggggagataaaagggaaaaccagagagagaaggacagaaatcatgctgtttcttaattaagctgggaaggagacaggggctgggagcggaatggcttgtggctcagcatttatcacacaactccccgctccacccggggcctgtgccggacaggagagccaagttgctcagaatggctttgctgatgtgccattgctggggtaagtggttattgatgaaggggcttaagtggtatgtgccctagagctcactcccagcctctgcagtttaccccatctccaggagctttgttgcacagtgctgacctccatgggtcctcttggcacccaagtcaaggaatcataccttcttcctcctgcccttctcacacacactgagctaggagttaggaagctggactgcctgtccaggctttctgactttagactctgatgcctctgctttaatggctttattactgatctgagaagtaggcaaatagcacattaatggcttttgtggataatagtgatttgggagatgtcacatcagcaaaattcaaaaaggatatgtggatccagaactttgaaagaaaaggaggggaaggttaaaaacaaacaaaaaagtagatgcagggagaaaagagatctttgcattttaaaagtattttgaatgcaatattaagcctcagaagattttagagatcatttctcccaatggttctctgccctggacttatattagaatttcctggccatctttaaagcaaatactgatgtctagcctttgcctccagagattctgaaataattggtatggggtagagaccaacactggcattttctaaaagttcctcaggtgattgtagtgtgcagtcaggttgaaaacactgatctaactttttcaccttatggtcaagataggtgatgttcagtggctttcacatggtcccaaagctggttaggcagaactaccactggaaatccaggttgccagttttcagcccaggtgtttattttacaccagatttccttgcaaatggtattctcgtatcattttcatgactattgccatatctttatatcatctgtactgttttaaaaaacaaatgtatttacatcaatttactctttaaacttgaatttatttgaaaagaaactatagtgccgcagtaagtagcagttcagcctcacctgccgtagatgggaggtaaccacaagaaaaattcaatgaaaagaaagcagcattgggctgagtttggtggctcatgcctgtagtcccagcactttgggaggccgaggtgggtggatcacgaggtcaggagattgagaccattttggctaacatggtgaaaacccatctctactaaaaatacaaaaaattagccgggcgtggtggcacgtgcctgtagtcccagctactcaagaggctgaggcaggagaatcgcttcccaggaggcagaggctgcagtgagctaagatcaaaccactgcactgcagcctgggtgacagagtgagactccatctcaaaaaaaaaaaaaaaaaaaaaaaggaagaaagcagcgtcgttagattgtagctggacgctgttgcctgccaatgactctgctaaacatggagattggtaagtggtaggtgttccagatactagcaccaaactgagactccctcattgatgtaatcagaacaattaagagaaaattgaaaacggcactcttactatgtgattccatattatttaatgctcatatccttgtaccattagaattgtcctgagcacattactggtacagttttatttcccttaacaagtgatggtagtgcttatataataagcaaagtagtctaaaaaaaggtcagtatctacaaaatggaaaaatgaagtataaactcaggtcgttgaacaagagacttgagaaacttagagaatagagttagaaacatgaactaatcatgaacagcaccatagaaatcaattttcaaatcaggtgagaatcttaacatttatggttttggccaccattgatatatcgttgttagcagacttgtaggtagtgctctcagctaaagcaataagttgaatttagaggagctggaaactttaagaagtgtttcttgagattctgttttactctttcttttgagattccaggtatgatttggaagattcatggcaaataagcttctaactaaaggactcaaatattataacagtaaccagcattttaattctattttttgttattgaatttccactggaagagacatagttctatgttctttatttggttacacacacacacacacacacacacacacacacacacacacacactcttacagttgcaggatgagaatctgcccagataaagtactaacatactctcaggtacttataaaaattactatcctaggcctggaatctattctagattttggttgagcacattatttcagatttggtcataccttttccctctctccgtatctcactcccacccatgtggtagcattcattttccaaattgaaacacttgcttcatattccctttgatttttccaaagacattagagccaatagggagtcttagtcacccggtcaatgctatttgatacatttccctaaatgacatgttcttcttcatgtcgttgcatccacgcaataattaaatgtaccttcaaacactattgaaggtaggtagtctttgagcttattgcttaattagttcaggtttgtcctatagtttcccatcactgtgcaatcaatactactctagacaacattccaccaatattgggaaaagatgcctcctgcctccacgagtggatgcagcagagttcaaattgtgttgtaaattagtcgtatgggaaatatcaagtcagtcatactttcagagaacttaataagtgaatatacctcttcaaaacacactttatatacagaaaaaaaacccctacatacttccttgggacttattgttcctttcttctttcatgtcttcaggttagtagaaatttcaaccgaataaaagatacagctttttcaaggttcctgacaaagagaacccttatactattttaccaccttctgggccatcacagtaatttgattgaaatgaaaagctggtatttttctgacaagagacctactagagagctgaaagagtaagggctgagggagtcaggagcccccaagatggatatccagggcctcttaggtaaagtgtggcaggtggagcctggtgccaggggcggcagatcctgggacagctttgccctatgaggtaacaaagcagttcctcataggggagcagaccagaaggattcatagtttctaaccatttgttattttggatttcctcccaagataattctggttaaatcaagagtttcatacataggatgctgaatgggaatttgaccctttttagaccactatatatatatatatatcttttgctttaaataccaacaggattatattctcggaatcaagggatcatggacactttattaaattatatttagctagggagttttccaaaaaaaagcaagctggacttgtgatggaaaaatttaagtaccgtgtaaagcaaaaagaattagactgtgaatgccttgtcaacagggatttttattttgttattaattcatctattcaacaaatatttatcaagtatcttcaaggtgccaagcactgtgctaggatctggatgtataacactaagtaaggcagactaaaaagttatggccctcaggtaatttaatcttgttaatctttatatcctcgttgcctgacacagtggctgacatgcaatagtccctcaataaatgactgttaacttgagtgtgaagtatgcccaagtgcatccttttcatctgtgtttttaagccttggtaaatctgcacctttgattgagccttactgtgcaaataatactattagtaacaactgtagcagctaatgtttatttaataaatgtcaaatgatttacattcattagctcattgtctcagggcatttatctatttgacctaggatttctaaagatatttttaggcatgtttaaaacctatctaccttttttacagagtttcaattagcgtgtagtttggtctaggccattgtaacttattttgaatccttttccccaaaccataatttgacaatgaaatcccattttaagcacatagtgggaacacaaacaagttctgattgagtgaactggatgcaattttaaaatgatattatcaggaggcttatctagctagatcatgagtcaagtctcagatctgtatgttaatgatttgaagtcattagtcaatgctgttttgctatatgtgtccgctggacttttaattttttttttatttttagtaagattctatcagcactgttttgatgaaatatttaaaataaaacaatagtaattgttctacatcagtcagtgcagttctgcaaagtaactgtagcttcttgcgccattttgttaggagcttgtggattatatcatgtgcacaaccaacaacataaaacctttaaaaatacagaactcagggtacttgaatgtttataaagtattttaaaattaatttttaatgagttttaatattttaatattatactggattttaagtaagaaagttgttcttgtattaggcagtggtgtacaatattacttcatgggataatgtttaattaaaatacactaatttatgtgtttgtttattagctctatccctaaagcagagagaacctcttcacaattttatgaaaaatgtaaatgagggttttggcaccactaatacagttaaattagaataggtaaaaatgtatgcttctactttcataactttataaaaaagcaccttaaaatgttgatttgacatacaataaagatcactttccagtgaaaagattaaactcccatgaaaacaaccttctatttttctaatttccttttgactttattaggttttacctgatttgttcttgtctcaaaacattttcccttgtttctgtaattgttggagtcattttgatgcaaggatattatagtcagttttttttttttaacatttggaaatggttagctacccttgctgaatatggcccattttgagtattggtgtaacaaatgagaaacaccttattgaatagtatatattctttgctggttcctcttatccccaactaagattttatgttcctcaagatttgggcttggtttttgtaaacttttgcagtggttttaaatattcatcatgttttagaaattagcaattatattatagccttaaccttattatgaaacttactagtttctttttcctttttaaaataattgtttaaatcccttgatatagacaaggggaaaaaaatgagaaggcatgtcatactccagtttttcagagttttatttaagtgttctagataccagcacacaaacacctgctgtttttactgttctgggtgtcatagagacaccttcagtagcaacatgtttctagcagaaaataaaacagattcaaactacattcaaagggggaatgccatgagatattttctctccattcttcctttgttagttatttatattcacacatcttcacttaactacattccttagtaaacagcttgcggggggttgatatttgttaatgaactgtcaataaacacatgttctctcgacttcttaaaaaaagactatattggggttgagtgtgctggtttccaattcctgttcacgccatggagacagagagaggagtcttggctgcggatctggcctcagagctgggcacggcttgcgatcacgtggtggaagcacagcttttgtgcagggaggaaagtggcagattttgatagagagcgtgccagcagttattaggaagaaatcgggaagtgtttggaaacagggctgctagcattcccaacaaagctggagaagtctctccaaagaacaaaaggcaagcacacgttcagggtgaggactttcttctctgttgacatatgagacgtgaagtgagtcagacgctgacccaggtttggagagaggacaaataataatatctttgttgaaggaaatggggtctagtcattttcttttcttcctcctgttattattctttctttgccttctctttttctctctatggctgaacatctctactcaattgcctaatgaagtccttctgactataaaataccaacggagaagaacctcggtcatttgcaaacaaaaaacaaaaaacaaaacactcccagtgacttgtgggtagaggaaagcaatgatgctgcaagcagagagtgaacgcagggaaggggccagagaatgacctttgcattttgggcaccaacctaaagtacaaatgaataagagaaacttagaacagccttaaataaaactatttataatttgattagcgttattactgccttctcttcactttgaatcaaattatctcaagagcaacaattctggaaatttttgctttagaaaaagaaaaaaaaagttgaatttcccagtatccttgtctgctttttttttttccttaaaaatttcatgcattgttagggaagaaaagtctagtctaactcacaaatgcatccttattctcatgtatatttgataccggccccagtctaatctgataaagtgcactttgcctgtggtgtcttacaataagctggctgcattagtgccgggaaaaatcaataccgatttataatttaccatcgcaaaaacctatcactttttatgaccctccatcctggctcattaatattacattaaaacacacacacccactgcaacagggggaaattgtagcttgtcaggtttacagccataaagaaacctttaattgggcttagtttgggaattcaggcacagattttgtttatttgttttatttttaatgtatgatatttaccttaagtgaattttaagataatgtgtaatatacctatctatttctctgaaaagaaaggagaaaagcatgtcgcagaaattctgacatccactttcatatagatcttatacattttaatagtctctaatagcattcttctctgttttcctatagtctccaaacctttttcactttcttcttttttctctttgtgtgagtgtggatttctttatgctgaaacattccagctgatggtatttctcttatctttttggcttgtcatagttgatatttatccttcccacctcagatcaggaagaagctaaatgccaccttttgcattgtctgtctctcaaagaaaggatgcatatttgatttttcttctacaccgaatggagaatattacactgaccctgcttggaaactgagtgattctcctagtgcttgttctttcccaaaagagaactgtggactctctctctgtgtgtgtgtgtgtgtgtgtgtgtgtgtgtgtgtgtgtatgtgtgtgtgtgtgtgtatcttcaattcttttaccttcaagaaacccccaaagaaaaatcaaacaatagtctttccttaatcaagcctattaagcagctttgccctcatatgtttttagacttaaaagtcttatatctaaattctttccagataatgtaaaaaaaaaaaaatgatgtcactgtttatgttggcagcggcaaggtgctctatttatttcatactattcaaatagtttccagggaatttttcctgtaaaaatcatgaacagaacttaccacatggcttgcccctttcccttgctgccttaaaggttaaggcttctgccccttccaaccttaaaaagaggcaaaatgaagtgtaaagcagatccaaaaaaataaataaataagggaagggggaaattcagtgtgttctcaagtgtgcagtagttccacaccatgcagcaaatacatgtcgtgattgggtttttaaaagacatccgcctggcccctgactgacagggcctattgattttttaggtttctgccgtcatcggtttccagcctcacagcggccgcatgtcgggggtcagggcgcaccggggcgcagtgagccagccctcgccacttcccaaagtgaagggccgctgaaagaaaatcaatcatgtcataagtgagaagcatcaaaaattttccccctgtatggccaaggcccatcagcctgtctccactcagtagctaaggttaggcatctgtcaagtcaagactaggtgaaaagtattagaaatgccagtttacccacgggtagaccgtgtgggtgtgaggcagcctcttccctttgtctggccatcccgggatgacagggttggcgttttcacttaatttttgagtcagaatcacccattttcccttcctttagcctttgtgtgtgtgtatgtctctttctctctcctccctcctcctaaggcagggcgggttgaggcctggtaccctgtttatttaagaaccagtgaaaagtcaaagtggatgcattcccaggcagcccactgggaggtcagcgccatggcattcttactaagtcacagagtatatttccctaaatgaagcagatttttaaccacccctttcatatcttgctgtggaaacgcacatgacacagataagtttaattgtgaaattaatagtgcatatcccatggtagaaattttatttggctactgtgctgatgtttctgaactgataggatgctaaattttcttcctgtgctactaattgggagaacgtatatttttaattctcagagaaatgatcaggaatattctgttcatttttaaacacctttttatatttcttacattccaaatccatgtcatgagattgcatagtttgttgaaagaaaccgtattaagtgtctaacttaaagaaaccctttacgtgtactttctaattgtgagtttagtatttagtttccaagctataaatcatagattatgtattctgtgagagaatgataggtttttattaatgtattttagattacattatttttaaatcaataaggttcaaatgaatagttttgcttgcttgtctgttttgagggataagaagggtggattggggaactggctgtcaggcgggcctcactttgtggtttgcatctactcagctctgcctcctttcaggtgtgttggttcactctggttccatgatagtcgctgtccatttaagaccagtttgaaatttcccaacaagagcttcttactggaaaatctgcaggaggagttcatttgggtgtaggggcagattctgagatttccttctgtgcatgggatgactaccccaggagcagtagaagaacctgaaaatgaattgaactgagagctctgctgtaactttccaccctaaattgacattcactgcctgaaccaagatgtatactcactaataaatattttagctctctatgcctcagtgattacactggccattccatacagataaaaatacaaaatgtttctttaatcagtactgtgatgtgagaccgttaaggtaatagtgcttgaaactattagaatctcaaagatattgactggcttgcttttggcatggcaattataattacatttttaggttacattttatgggtttatactagttattctaacataaaagaaattgctgtccagaattttaacagagggcagaatgatctaggttgaaatccttagcagtcccagcatcagggctgctaatatatgatctaattgtgatcaatactttcttttctagtttctgtaatgacaaggcctttgcaataaaaacactaccatctttttgaaatccacagaatgataaatgacctaggccaacttgggggtgggggtggggaagtgtagtgtattttacattcctagtgatttattgtgggtttgcacacataactggtgtgaaatcaagctggaggggggttgaggggaggaggaaaagtacccaacaaagaaatccattctgcctaaaatgcctaggtttaagtcccattaccattgatgtgagctaagtactctcatcaagaggcttgggagcccttgagttatttagattctttttgtaacattacaggagaggggaaaaaagccaacacaatgaatcactactttgctatgtatgaatggctaggtcagcctaactcatgtgttacataaaaaggaccaatttcattctgtcttgacaataaatgaaagcttggctttgaaggtactctttgctggatctatttgcttttggagacagtctattggacaggctctgggaggcaggttatttcaggtgcaagaaaggaaatcacctcgtttcattaactattagggacttaacttcctttggtgtaaagctgagtccaatcatcccagatctccaatgagaggatgggggcgtgcttgctgtcctaatcaaacccagctggtcattcggtcccaacaggtaaagtttttgaggaagccaagtagagatttgtgaattctacaatataaaaatgtgaaaaatgtgtcaatgtgagccccttccagctctgaccccccagttgtttatgtccaacagtgtttctcatgtggctgtggataagtttctccctctttccattttaaacttccatttgtaggttgcttgtgacattttgcttcaggccagcacttagcatataatattacagatgcctgaaatctttcagcctttctttttcttttcttttcttcctttcactctcactctttttttcctgcctctctctgtctttcatttcactcccaactccttttttccttacaacaccaaaaactctttcgtttaaaaaagttggaaaatatatgaagacaccacacagcattcacaactttagcactgatctgatctatttttctgctattcaacagacctggattttttccctgtgaaccagaaagtcttttgttttcttgtctcagtaaacacagcatacggtatgtactaagtattaggactcaggggtcttattcaaatattttttggggggagtggggtcaggactatggaaagagatacaggaggtgtaggagactgggttttaatgtgagatcattaatcatttcttttttcctgaatcaggcttgggacaaaagggataaagagggttttcccctcaaatattcaatttatcctatcagatttcccacagtgactttctctaccaaggttcttaatgcactactcttagaatgtctcatcagtgaccagagctgatggggtctttgaacattagacagtacccattagtcaaggtccctgggctaacatctctggatggcattttcttctaagtgtgccattagttagtataatggactggtgtctgtcagcctttggggcaggacagagaggtgcatcgaagaccctttgttagaagatgggctgtgttttttcttcaacctgcaagcatgtccccagcaacgtttttagcttttgaaagacaataaatgttaatagcttcagtgaagtctttataatctcccaggtcagaaattgttgctgttttttctccttaaagtctcaaatatggatttacaaaatactctttggaaccattatagtcttttgggtaaatagttttcattttaaaacatttttataatacacacattttaaaaaatgttctaaatatgtatttttacgattgatcatgacagcgccttaaagagccattattgcctatcagggagataatgtgtgtgtgtattcaagaaattgtctacaaaaagaaaactccatctcgaagccgtgtatgtttccaatgaggatttttttctcaccaataaacttgaagaaattatgcaaaacaattgaaatttagacagatcatccaagtgagacagttcagagttgaggatttttgcaatgcctctcaagtggcaactgagaaatttcaggattgaaagctcagaaacactggctaccttccttgaggctgtgaacataggttaccaaaggtttaggtaattttccagactttctgcctcaagcctgaagtttttaaaaagagaaggctctgattatattgggttctctgaaccacaggttgccatccaatcatggagggctagaaatcagtctgaatagggcaactacttgttggtttattcaaacgtactgactgtatcattgtgctaggaattagagatattaagaggatgagctgcatctatgcccttggggagcatgcagacctacaaacacgttcactgtggcaaatctacaatggaggcatgaatgaatcgaaacaccagcaaaatgatttaggaataagaacggaactgctgttcataagatctaggtgtctgtgcatttcctcagggtacaaggtggtggcaaaagactgagggagctggcccaggtggggagaggtggtgagaaccagaagatggcatgcaggtgataacaacaatgacaatgaccacagctgctactaccactactactactaggaattattgaggattttatgggacatttagctaagaatagaatatgaattaatttttaccacggaagataaatgtttgcctcattcaaccaagaaatatttattgcatgccttctgtgtgctagttacttgggggtataatgataatagggtcctgctcccatggaacttatagttactgagattgggggttctggagctcagacattaaatttaaaattcacacacctgaatgtgaaatctgtaatgtgataagtttacaaaagggaggacgccaaatatctgggtgatttgctggtcctatctaatgaaggcagcaggtgtgtgtgtgtgtgtgtgtgttggtttgagctggttaggaaggtgagggaaacctctgagaaagtggtgaaagaagaatggaagtcatgtaggtgaaggggtgggattggggtaggagagtgtgaagaatgttctagagagggaaataggggatgaagagagaaaaggctagaaagaggagaaataaaaaggtgcatcaagagggtggaaatatccttccctctcctccccttcccttctttcaacaagtatttactgagtacctttcaagatccaggcactgatcttagcaatggggattagcacaaataaaagagtgaaaaaatccctgccctcatggagcttacgttctagggcagggagacagacaatcaacacacaaaccagtaaaatatccagtacgtcaaatggtgatgaattctgcaaggaaaatagtttgggaaatagggtgaagaaatatttggggaggggctgaagttgtcattttaaatacagtaactagaaaaagcctcactgataggttggcttttgagccaagacctgaaggagcagagggacagagccttgcggatagctaggggaagcaaacacagggcaggaaaggcagtgtgaggccctgcagggagtgtgcctgacaggtttgaggaaggctatggaggccagtggggaggagcagaacgtgcatgcaagaaagtagcaggtggcgctgcccaaggcatcctggggccatttcttgggccccgtgggcgctatggaggtcctgggcttttactctgagtgagatcggaagccatcgaaagtggaggacaaatagatgagaagaaggtttccaagcaatgaagaagatatccacctagtcattagcgttaagccaagaagccttaaactaaagggaagcgtttccaacaacaggctttgggtattccaggtcatctgacatttcctgagtgaaaccttaagaccactacaactagtgatttgatgtttttagaatggcttctgggtcagttccactaacaggatggctaagccgatcatgattcataaagatgcattttgggaacagatccattgtacttattaaacatctatccgctttgacaaccgtattgcaaactcagtttccacgaaaccatctatgtttatgtgacaactgtgtacctaaatatacgagacagtacgtgggtaatatgggcaggtgactgaaataaagtcagctgagggctgagtgacagggcatccagctgggtagatggaagagcagggagggaaaaagagcagctggggacacagattgaggtgggcaggaaagacaatggcctgtcaggatgagcaccttcccacaaaggtcatcagcccttcatggacaatcagcacggacaccttggcttttgtgtaagctgaagtttcattctctagagaacccagtgtgttctccaaaaggaaggttaaaattcattgtggcaatttgcaaaatgatgaagaggaagaaatagtttattattcacattcaaatgctttgttacccatacatgagtgtccttcttctggttccctttctagcattagggctatagtctttggtatgaatctttaatattaatctctgaacactaagaagcaatttcaatgttatggactttaggtcctcggcacttttccagggtggaggtgagggagagcactccctaggcttagctcttgaagacagtgctggatgggcgtgttggttctgtgggctttttagaggccacagtaaaaatcttcttatatttagacctcttcatgctttgggactgcttgtgatgtttttcctgtggtcttttggtcatctccttgacaatttcctcctatggcatttattctagaaaacagaggttctcagtatcttggggcaaacactctgatttttagtgaaaagtcatggaacctcttcagccttgacctgggcgggaggtgtcctgcaaccgaagcaaaagcaaccacgactccaagaaggcagtcccctgacagcctgtactgctgggtccagggccttgatgccgggaagttatttcgtttatgtttgcctgtttaaagtccccatttgcttttcttcaaggtccagcttccaagtctagttgactttttaccatcactcactgggctggccacacagtgccggaattcatgggcctccctggacaggctattttccgagacccatggaaatcagatcaatgctcgctcgctctgtgactttcatcatccacgtgctttctaaatatgaactcattcttcttgcaagaatcaggttaagcattgttatccccactttacagatgggcgtgcccagatttcattattccgaagatagattttgagtccatgataaatgtacttagcattatagtaaattgaagatgaaaaggcctaataggttacccggtattgcccctccctcttcacctccatgctaccagaagctcctgcaatctactttctagtgctttgaccagtcttggtttaaatgtcccaggggaacctccctgtaaggctaaacttggagaaagaatctccttctaaaagctacttttgtggtctcagtgctatgactcctcctccctacagctgaaaggcacttggaagtgagaggaatatggttggaagtcttttttcctttctcttttaggagaattacaaattccaagagtcacatgtgtatcttttccttttatagtagatttttatatgcctttctaggtttactaacagacatacaggattttgagttacagttgggacatgagctcatgaaattagtcttaactgctttaacccgtaggtgcttgtgtttatggaataagaaagtcataatcgctgaccgcagccattaaaatctgatgtgagtcaactttgagtacaaaggctttctataagccaaccctcttgaagcagaaatgatcacaatgtaatataatgagaataattaataaggagtgtgccagtgaccttgaatattaatattgtttccttttcctgtaaacaaactgggttattttattattattttagtgtgtaatttggcataaacactccttttcacatgatttccccaggtgacttttgtctccttggcaatttccggctttaataaagaaaacctaattaagaaggagctgttgattggtttgctagtgtaattaacacaggtgatgctaatgagtttctatgaaaccggtggtttatgggaaaaataaacagaccgttgttgcatatggcccaactgatatctgcactctggaagaaatgatgatttccaagtctcctgtgagtggtttgtgggcatggaataggcagataaaatattttataagattcattagtggaacttgaccaaattgagagcaaaaaaagtctcagtgttaggtgatattaaaaaatctgatccctggctgtagtacgggttaggtttgtcatttttcatgtgcctaaaaaggggcagatttcttttgtttggggtgtgtttccaattttcattgtaggcatttgaagtttgcaaaacttccagcagccttttttttttttttctttctttctttctttctttctttctttctttctttctttctttctttctttctttctttctttctttctttctctttctttcttttctgtctttctttcctttctttctctctctctctttcttctttttctctttctttctttccagagtctcactctatcacccaagctcgaatgcagtggcacgattacagctcactgcaggcttaacctccagggctcaagtgatcctcccacctcagccactggagtagctgggactacaggtgcctgccaccatgttcaactaatttttgcttttttttttttttttttgtagagatggggtttcaccatgttgcctaggctgatctcaaactcctgggctcaagtgatcctcctgcctcggcctcccagagtgctgggattataggcatgagccacagcccccggcccctagcagtctttctagggacattttaatttttattcttttctccttgactttgcccattgacccttgaggatgctgtgaccaggaaggcacatgggattgctgcagaaattaagattcctgaaagtctcttttcttagcctacaaatgcttcctgaggagcacttcttttgggttggggggaccgagtcttgctctgttgcccaaggctggagcacagtggtgcaattttggcttactgaaacctctgccccccaggttcaagtgagtctcatgcctcaacctcctgtgtagctgagattacaggtgcacaccaccatgctgggctaatttttgtatgtttagtagagatggggttttaccatgttgtccaggctggtctcgaactcctgacctcaagtgatctgcctgcctcaacctcccaaagttctgggattacaggcgtgagcaaccgtgctcagccaatcctgagaaactcttgatatttgtattttcagtggtatccaggctaggttggtacatccagaattacttacaagaagcaaatttcctttctttttttcttactttttctgggctgggaggggtgctagggacttcagatgtcatttcacaactttatacaaggaacaagatttttgtggcatcaatgcatattttctcattgtaaattttacttggaatacatagctattagtgttgataatttacaaataccctgttcaatttcaaaaatgatttttgaagttgttttcataaaagacaagttgatcataagtcctttgatgtttacacagcattttgaggccccttctctttttcagtggtatgttcttcccaaatcaattttttaagtatgtgttttgtcttcatttttatctgatatttcatcagcagcaagttaattctttctcttttttcctgtctccaaaaatgcctgttccactttgtctctcatctattgctatgtgacagaaaaacaagagacattctgtgtctagcagtgcacctccagggacatcttttgaactctcataatttgtatttattgccacccactttgtaagttcacagtttaatttgccggcagtggcagtgttaggccgacacagtaaaacaagataacgttaaaatgtcagaatgagagggggcatgaatgatgcattacccctaccaggacttgcacttgtcattcctttccaccaaagtgatgttaactaccttttgagagctttatctgactggtattactcagaaataggatcattagttcactgttctgattaggaagccgctatgcttgattaactcttcttggactgggatctcagtggaagcattaaatgaatcgcactgacttagacatctagaactaatttataatttttttttgcaattatttgtagttgttgacatgtgtttttccatgatgtggtacttaacgggaatgagttaaacctactggagacaagcatgtttgagttgcatattttaacccacatttcaagacaggtcttctagatttacaaaatgtttcctgtggacagatactaagccattgttctcaatagcatctatgtgtaattcattcacaactttttgaaatttctgagtttgggaaatttcagcccttttgtagttttggctgaatcattgccctagggggaaactagttgaattcatgtttactcacagtggtgacttcatgggtgttcagaagcagggctaacatgtgccttaaagaaacttccaaagtgataaatctagaatattgaaacaggaaatccctccccacttccccattccccaaaaccacctcacgcagttctttccctctctaaaattttcttcgtaatcctgctgctgtctgaaatcctaccatattgattctttggcttctgagcaactacataactctctgccctcttccaaacatatactcgatacgtatatggatgagttttagattatctcaagagccagttttgatagggaaagcattgaaaggctggaaggtgggtatgggagtagcactaaagagaaactttatcctacaacaagcatcttgatggtaataaagacgtcttttgtgttccatagaaaagggctccattttacggtaaagatacatattgattctggtccataattccagaatgaaacttgtattttagtttagcctttccaaaataagaatatttttcaccttataattcaaaacagaaacagagctgtatgaaatcatctgagggggatttgtatctctcctgcactactgcatgtacagtgcccagcactcctgggagctccctgtgcatttgttaaatggaagggatgaagttatcactatggagcagccttccccaccccccttataagtacattcccccaaatctcttatttcctgaaaaggtttttttatctgtgtagatccagaaacttgggttgttattacagatgcctctgatgaacctggggttaccctgagcatattaacagcaccatcccattatgttcctttatcatatacttgacatctgccctaaattactatccttcactatctgcttaagtaagcctatgttctctttggagatttcttggcagctaacccttggctgtagatacagatgaattggccttcagctatttgtattaaaaatataatcaggacttgcttgtctaaaaaggtgatttggacctggttttcagtaccaagccaggtggctgtctttcggggggacaagtttaactgagatgggggaagctggatagcagtgtaagaattcaaaaaggaacttgctttcagggtagttacgataaagccctaggaggtacaggaaaaagaatatgtgtttggtttgagtttcttgggtctattaattgccttctaagagtgtactttttgtcggggtgaatcatttatcgccaattccagtttattgatatttctctctgtgagcctatttttcagtggttttgccatctattgcccagagaattgatgctgtctgagatttgactgtaatgctgcttttgtagagaggggaaatgaaggcatagaaaaataaatagctttttataaccctatgtgaaaaagtgatcatcaaattggaaggactttttctttttctccttccatacctgtgtggcagaaccttttggtcaatatgggtcaggcttaatcaaaattaactttattttaaaaccgctgttacttggaagttccctttctatactctttcttagaagggaaagttgggtgtgaagttctaaaagaaaagctctttggacaagaaaatataaaacattttcccaagagtcacaaataccagtgtgtgttttagggaagcaaccaatgttacttcttctagaaataattggtgtaactgaattaagattactttcccaaatcagatcctctgccttactcaaggtttcctgtgttctaccttgtcccagatagagaacaaaatgaaaccctcaccaattttgtctaccttttttgctctaagccaaggttttgcagcaccattaggatgtagattatcatatttaaaacctgtgatgacaccgttgtacccatctgaatgattaatctgctcattaaaagagtgccgatgggctagtctaattggaacatggatcttcttaaaggacgttacagggtcgggaataggaaatattactcataacataaagtagggattaattatgctactaaatactactatgtgaaatttacatatgggtctggttagagacaaggattagaaaaagtgtagcatcccattttataacatttatgtcaactttaagacaggtggtgtgttccttctttaatcccaaatcttaaatcaacatttacaaaagctgttataaactcaaatgccacagaaggcttagaggttgggataaatgcagaatttgcataagtgaatcaccgtgatttaactgtatggattttcaaaaacaattgcaaagatccaaagctgcagagcagtctctactctctgttaaagcttaaacttctgcatgatattaatcttcctaggaatgaaagtacaattgggatctttcagaaaataggcaaatccactgagcacaagtttgcaagcattttttttcccaaataacctttctttaaacaaacaatatgtataaaagatgtaaggggactgctcaaagcaaaggggatgggagatttgaatctccacctaagagcttttatgccacatggatcctgtggccacacagttagaaaaccaccgtataatatggaggtggatcctagaatctgggttgaaaagaaccttgaagctcttttattctatctcccttattcccaggcaagggagcacaaaacttacataacgagttagtgacaaccagagctaaaaagtaaagtttttgactcatagttcagggccattttcaacaaacaacacgatatctctagtctggttaccaaatatctcaacacgttggattatttgtttgacgcatcacatgttaagctatctctgtttactgaagtcagatctgtttgacaaatgtgaaatatattcttacacatcttgatgatttgttgcatttccactacttgaaaattcatattatttttttacttgtaggcagatgtcagatcatgtgtcaagtaaaaaatggaaagttgctcctctggagtaaacactgtaccaagagaaatgaaaattagagcacttggttatacgtgggcctctacctgtttaaggaactcaaaggattacatattggtgttttgggtccttccaagctcagctcagagaatttccctgggctttggtgatcatataatatttctgggattggggaagccttaggtagagaatactgtgcttacagagaccctaacagactgtcattatcaattcgagcttctccatacctgtgggtccttctaaccagctcccatgtttgttctctcctttccattttattctgcttgtctgactgagttgaattcaccattatctctcatccagattactagagtaacttcttagctatctcctggcctccagtcttaaccctactcggtttgctgtctacacggcagctagaatgatctttctgatgcttctgacatcactcttctgctttaaagtggctcccacttggacagcctggctcctcattgtcccagagatgaaagtgcaagcttttaagagttatgtacagtgtccttcctggcttcatttcttgctactcccctccttacattggaccactttgcactgatgcacactcaccgtgaactctgagcttgcttttgtctttgcacctgttttcccctataactggtatactcttcttagctttctccttgcctcagctttcatcttgctgtgtctgacttatccttaggattaaattcagcattaacttctcaaaggggccttcttggacccatcaacttagggtacaagtgtgcactctttctccgtcatagcatttttcacactgcctggtaacagtttaccatgtaactccccccatccccagcagcgagctccttgagggcagggtgcaggatattattgtcttcctatttttgtttccaagtactatgtctgattccaagaatgaaatcaataaatgtgggaggaaggaaacaaagcaataaacctcaacaagaatttacactagaaattgtgcagagaaaatgttccaacactctttcgttagatattccattatatactgccattcattaatagctggatgggtgcctttttatgtcatgtttaaatgtttcgatttaatatctttgtttttttcctacccaagttacaaaggggatcaggtgaccaccagcttccctagtagcacctttaaaagcacaggatccctggggtcgttctatttgtgattctacattgcatgctttgtgatatgttttgtgtgtaggcagaggcctataactggtagaagaggtaggaaagttgttttttcagttggagggagaagcctttgtcatggacttcggagtattctctaagcttgaattgtggcatgtcgtaggggtcagttctgaagatgttcttactgtcatccaatgtaggagatgaaaccttcaaagaacctgtactgtcattccgtaaaagttaatagcaaagtatcattgcaaatctgttggaaaatgtttgttttttttgtggtaaacctctgaacatttttaagactctagtgtgtagagaacctttctttagaaattcagatctggtgggataccataattggctagtggtggaacagacatttgaggatagtattctttagtgaatatcattcattcctggacctccacagtctgtaagtgaaaatataagctataagccaccgaagaagttaaggagatacgtgattgtagtaaaaccttgactggccagaatgccagggaaatggagtgatctgttatgctttttcagctttgctggtggaaaaggatttcatcatcttttttggtaaatagtggtctgtctatagggcagtgttataggaggtacaggaggttgggctagatgtgaactcactctggggtgtcactgagttgttttcctaaattttagaattgtgggccttttgagtcagtatgaaacttacccacgatctgataaaaccccatccttaaagaagtggaaagggaggctgcagagatggctcgaagtcctatacctttttagtcccgcaggcgagatttataccttgctctcagacttctaatatactgttcttcaccctgaactgtaagtacctatatgggctttgtaggctttaaaaagtatttactttcattctcttataagcccagtacagaaagcaatgctagttaactgaggaaagtgaatagaacataagaagttgtactctgataaaacaaagctttctataatgacactctggtttatagcactgagaaacttcatgattctagaaactcttcctagggagtgtgcagagtcaaagttgcaaactggcaactgtgatcatattgagcttggggaagcgtttcgtttggccattgtggtgttgttgccttgtagatggggtatatggtcctctgcttgcctcggtccccagcctcttggcagcttcacttcattatgttattggcttggtttccaaggcttttgaattggaagctctgagtttaatgtgattgtttgttttgtttggggcctacaggaaggtaagcaagagatgcctattttattttcaaaacatctgagaagggggctacatttatgggatgggctagttgttgacaatgttgtttacgtattttggaagcataccgcccctcaagctgccaccggctttatcagatcacttaaacacagtcctgtgctgccatcgatagcagtccaaatctgtgacaattggtaaccttcagcgtttgtatggaaagatggttgatcggcctgtgcatcggcacagatgcaaggtgtaaacaaatggggttgatgcatttgtgccactaaccactcaggtttatacaaaaagtatcaagctttccctgtttcatctggaataagactttctaggatttcaaaatttcatttttctctcttcctaaaaaaattcgctctctttccctcagaagcttagataaagaaataattattgagaaaatagaaatgacctccactggtcggagttttacttagtggtaggtggtaagcacataatttatctcttgttcctaaaatgatttttattttttagaaaataaattaaaagagtaacttacattctctgtagagaatttaaaagaatacagactggaaagaaaaaattatcttttatccaaaaatttggaaaaatcatctttttaacatctgtatttttttcagaatattttctctgtatatatcagaactgtgtatttacaaaattggattatgctgttttgtgacttgcttttttcttttattgtgaatattatagtgtatctcataattttttaaacacatagttgcacagcgttacatcctatggctataagttatttactctgttgtagagtctgtagtcagttttcaattttttgcaattgttaaaatcagcaatgagccaccttgtgtatctttgggttgaatatgatttttttttcctttaagcttaattcctcaaagtgtaatctttgaattgaaggagatgatcatttttaagccttctgatatatgtggctaaattgccctccaaaaaggttatactgtttacactttcactatgtgttaagacagtgcagttcactggcgtcctcaaaggacctcatttagaaacttgtaccaacttggtaaactgaaatatagtatttatattttgtgattattgctgaggttgaatactgagctcgaatatttttctttgtgtttttggccatttatatgcatattttggtgaattgcctattcattttctcccttatttttttcccttatgggcttttatttaggtttcaaaaaataaacatttattgtctcacaagaatttcaggtcagatgtagcaatctgaaggctcgaccggggctgggagatctgtttccaaggtagttcgttcacagggctattggcctgaggcctcagtttcttgatacaaggcctttccggggctgattgggtatcctgatgacatggcagccagcttctcccacactgagtgagcctacagagagcaaacaggaaactgacaggcctttttgacctagtcttggaagtcacacattgcactttttgtcttcttctatttgttaagagcaagtcactaactctagcccacattcaggagagagaaacgaagttccacctcttgaagaatttgtggatatatttaaaaaccattagagaacctattttttaaaaacatttttcaaacattttcctccagtttgcccttcaatttaaatttttttttacagagatgtacaattttaatatacttaagtctattaatcatttccagttttagagtctttcttttgctttgtgcttaacaatgtcttctttactctagggtcagataaatcttcacctatattttcttttagttctttgttgatttcactttttacatgtaacctctttagtgtttctataatttatttttagaaataaattagatacagcaatttttttctgaataacatttatttaagtggcaatttttgaataagctcactttctcttaatgatttagaatgcctcatttattatcagtaaatatagggtagatattccactgatacttacaatatgactatagcccttattaaaatcttaaaatgcttccatgctgattggtaaatatctgctgctctaagtgtcccctcctttccttccccctcagttcagacccttctctatcaatttaaaggggcttctctggtgcatttaaaggagtgagtgtggtattatgtcttccagactggagctccagggacaatgtaggtgtcaattctgctattttgaatagccaccctaactagggatatataggcacatggctttctgttctgttccattgattggtcgatctagtttgattctcttactgcatgattttaattgctatggctgtataatgtgttttaattatataatcatcccccattttcatgactattattgcttatttattcttgtatatgaatgaatcatatttttggttaaaataatgtctttagaaagttgagtaatgtattaaagactagggaagttgacatctctactaaattgagtctttctatcttgaaagtatatatatatatacatacatatatattcttttgtcttaaaagtcttcctattttgaaagaattatatattatttatgtctttaaaattcttgaacaggcctggtggctcaggccggtaatcccagcactttgggaggccgaggcagacagattgcctgaggtcaggagattcagacaagcttggtcaacatggtgaaaccccatctctactaaaaatacaaaaatcttccaggtgtggtggcacactcctgtaatcccagctactcaggaggctgaggcagaagaatctcttgaacgctggagacagaggttgcagtgagctgagatcaagccactgcactccaactagggtgacagagtaagactccgtctcaaaaaaaaaaaaaaaattcttaagtagagctagagtttttctttatatttttgttttagtttatttcgatttgttttatgtttggcatctttttttggtgttaggaatagtatattttctaaaatatgggcaaatggttattacaattatttattcctcagatatgttaatggttcaggggttctttaagaaagttattttccaagctttggaaaatgcaaattcactgaagtcctttaaataatccctcctctcactagaattttgaattaccttgatatgatgcacaaaaattctggtcacttacattgtttaagtagccagttcaagatgacttggggacaacttgagtaatgtgcgaatcgtgtgggcaatcacatattcctgatatccaaaataccagccttttcattttctttttctgaatgtttctgcttgaaattacccatggtttaaaatatgcacggcacatggcattgaacgtgggaagtgttgttaagttttgaatgggatggttagaaaacggcgtttctggttgtgtaagagtctctcatctggatctgaagcctcttccggggaattccaggccttctcccctctatgtcataaaaatgactgggtgacttcgcaaagcaataataccagtgggatgtgtatattaacctgtctgtggggggaaaatgctgagagcaacaggcctataatttaggtaatagcgatagcctatgaaaaacatgctgcttttgccttgatgctaatcaggaaaccatcagacagtcttccctgactgagtaagggcagggcgggaaggaagtcagctgtcatcatgtttttgaagaagaaaaaaatgagaggtgaactgaactctgtgatcggaacctcactctaaggccgcttcctgaatttaaaggtgtggtactccaatcagcaccgcaaattggaggcatctgatttgcatggattaacaggagtgggtcacaaccttctgacaggtcaatggcaccactggggatttgaagaaaactttgattctccctcttttccccctctgccatgaagcaatcatgctgttctattgtaaaagaggatcccttacttataaagccaagcttgtcatttaaattcactcaagttaggacaccaccgagctctgtcagatgtcagtctcaattcagcaggagaatgtttttcaacagctttctaacctctttgccgggaaacacagaggcttggatcaagggggaggggcagctgactgggcttgaaggatttttacagaggcaagattggaatttttcatttcaggcaggttttctttttctttacgttttcttattattattttttcctttttccctctaagcctcgtgtaaaagatattcccacaaaaagagagtgaaaaaaagtcagattggttgtaaggaccacttcagttgagggtctccttgaaggtatttaaacctgggagtgatgttggcatcttttctgcattaggggtattggctgtttgccaatcatttcccttgaaaaatatcatgcggccataaaggaactatgaaatgtttggcagaggaagcgtccatggcagaatagggacaaagggaaatggagattttctgattcagcctctggtgccagacccaaataaaaagaagaggcacatgccatggaactatggcttacctgaaacaccctgggtcaaggagctttgaaatggtagtggcagagttgggaccatttttttcttgaaccttgattaaccaagtgctctggagataaaatgttcagagagttctaatatactcacttgctacgtattgttttctacatttagctacaactgttgattcagcatctcctataggccagatattatgccagacctaatttgcaacaaaacagatttggttcctgccctcttgggacttcctgcttagacctgcctcatcaattttcatttcttatgtgacttaatctttgtcatttaaattccagtattttcttgcatccatgacagtgcttaccattgtattaataataccttacagaaaagtctggtaaatatctataattttattggctgttcaagtaatgtttaaatttatgaagcctcagttttctcatctgtaaaatggggataataatgtctatctcacagggcgcttgtgaagagtgaatggtataatgtatagaaagcactcagcagagagcttggcacagagttcttagtaattgggagctgctagcatttttcattagaagtgtggctcacgcctgtaatcccagcactttgggaggcctagacaggtggatcacagggtcaggagatcgagaccatcttggctaacacggtgaaacccggtctctactaaaaatacaaaaaattagctgggcgtggtggcaggcgcctgtagtcccagctactccggaggctgaggcaggagaatggtgtgaacccgggaggtggagtttgcagtgagcccagatcgcgccactgcactccagcctgggcgacagagcgagactccatctcaaaaaaaaaaaaaaaaaaaaaagaagtgttggtggcagaggtagtgggagtggtagtacatgcttaacatctagaaccttctcttctggttaattccattggaacctttctataatattttcaatattttcaacttcttttttcttttagtaagtatgtctttctcaaagaattaattgtttggatggttgaagataacttggaagaccttaaggtcgtgatttcatgatttgaaacaaattgtcaagagctattttagaaggaatatctgaaagtgtgcgtgcgtgtgtgtgtgtgcgtgtgtgtgtgtgtgtctatgtgtgcgtgcattctaaggtacatcctgcaattaagcttccagttaaaagtccagttttgaaaaccctcttgaacttctttttgagttctctttcttttaatggttacaaatgtcctttcagggaaagttactctcagctctcattctcctcctggtgaaaaacattcagagaccattaggctgcatctcagtgaaaggaaactgcagcatagaacttgatctgaaaagcctgtgacacaccgtgtcgctccaaagtagaagcctccttggtactacaagactgtggactggagtgtgttgctggagtttgacatgggttcaaatcttgcctttgccatttattagctttgtgaccttgggcaaatttctaaatctgaaagacacacacacacacacacacacacacacacacacacacacacacacacatttatatttatttaattaatgcagtatctggcatattcaagcaggagcttgtaacaaataagtaacaactgtaagaaataagtatttgttgcataaacaaagcaatggcctgcaggtactcctcctttggtaagccattgctaagcaactctttgctactcttcctttcagctgctggctgaacctgcagcatcttcttgtgactcccctcaatggtagcacacttctactctttgagggttgatctgagtttcggaaacagccagcagtaatttgataacgaggctggtgtaaaacatcagtcgattaaagatcattttagatcagaaatgatgcgtccctgtaagggaactactatattgagatgaactcaaaacattctgcctggatttccaagaagagctgcaaatgctctcaagcagtcttccaaagtgacaattaagaatgggatggaattcattttgatgtccagctctggtctaaaagtcagtcacattccaggtctcactctggcccctgtgctctggaaagagaggagcagtgagatatggccattgttgatatgaaaagcagaaggtggaggtcccaggctgctgagttagccctcagtttgaatcctgcgtctgctgttttttagctctaagtcctgaggcctctaatatacatctactctgcaattacttctctctctctctcttttttttttagatggagtttcgctcttgttgcccattctggagtgcagtggtgcaatctcggctcactacaacccctgcctcccggattcaagcgattctcttgcctcagactcccaagtagctgggattacaggtgcccgccaccactcccggctgatttttgtatttttagtagagatggggtttcaccatgttggccaggctggtcttgaactcctgacctcgtgatccgccctcctcggcctcccaaagtgctgggattacaggcgtgagccactgcgcccggcccaattacttctctgtaatttttttcccctgaggattggtggggaaaaaaaatgcttggcacataacactccatgttaagtttcaggattatttcttctttttacattattttagttttttgttcatatgtactcagggctcacactttgcttggctccgtaagtcctagagaaaaatggtatgagaaatgaattcacatgaagcattagtgccttagtctcttactgtttttacctttcccgtgaatatttgtgcttacaaaatggtgtccagaaaggcagtgcctcagcgagataaatatgtttctaatcttagcatcttgggcagagtgaggctggcatctgaggtcagggaggccacagggccacgctactgaccgcattggtaacagactccattaggttgacagaaaggttaaggttcctggaatctgtctctaaattctccgtaccccctcattaggttagaagccaatgccaatacaagtaaccaataccaaaccctctcttgcttacagaggcattattaagttgggggcaccctaagaacaattcattgcaaataattgttggcacatttattctcatggcacaactttcaaaagcaaattaattataaactggttgcaatttaattcagtttgtctggattatgtgtttgcaaggcctagagtacatttggcaccgttgctggcacatttggattttaatgtctttgacaagccacagcttccttggcctgggtaaacggcctactgccatactgtcatttaactagattgcgtcagagtgactctttagcttcgcggtgggtcttcagtttacaacctccacgccaccccatcagccgcacgggcatagatctcaacatgtatcaggaaactggaagaaagctgtgaacagaatactctgagaaaatgatggttaatcgtgtagaaaagtttaactatttgcatcagcacaatattacacaggcacatacgactttcagttccctaaacctgagaaaaggtttaacaacattgtgtgaaatctgacatcttgctattcatataaatgtgaaaggcagattgggaaaaatacagtaaaatccccgcttttgtgcagagaatggtgcatatttttcccctaattatggaaggtagccttttatttcttctgaattcattcatttctgagcctgtgttttcagcttgcttatgaaactcaattataaaaccagggttaaaaattaagtcaagtcacaggctatactcctctttgattctggggctcctgagaacttccagccctctgccactggcttgaaaaatctctacccttacaaatctctcaagctttcatgcacctctcctacacagcagattaattaaggaaaaagatggaaaactcctggcaccattttatctttccaaactgtgatttgcctcttccccctaaatcttcccttccctctcttctgctcctttctcaaaaagaaagtgtatgattgtcaactttctgagttcaagacagtggaggattaaactggccttactgagatttgaacttgtgactcaagtcattggattttgtgaaagaggcccaaactctccggactggacaggttacagctccggtttctgtccctctgctgccttttcctgggtagcatgatgatctctggcatttatctatctatgaggcttgcaaaatcgcggcctgtcataatggtaaataaaatgtgttaaagttaatatgaagaagaaaggagcaattacaactgcttaaaacagtcttcaaatatacttaagcagaggtttgccacgtaaacacacaattaaagcaggaatttgtgatggatgcaagggtttgacggtcccagacatactgtttactggtgtagttagcagatggataagtcaactgatcccagatgtgcagcttataaatataaactcatgtcttactagtgatgtatgtctgcaagtagcaacaaattactttctatttaactcttgactgtttactagggggagctttgtaatgctcacttgcttaaaaaaaaaaaaggatttttaaacaagtttcctcttttaaaagtggtaaccaaatatctaaaaaaaaggtactttggtgcagaagttgttttaaaggacaggtttaaataggcttacttttttcttttaagttcagatacctaagccttatgtccctagccgcagttttcagatatttgcagctaattaattcttaggaaatctaatctgaattgaattaattttcccttttagggcacacgaagcaacttttaggtaagaaaaaaaatgaaaacagcttttgttgcacataattcttgcaactaatgaaaagtaatattgctgttcccttcaaataatgcaataacaaaacaccaaatgagagcattgcattgtattgttatatttgctgtttaaataatttagctgcaaaaatctgagggctgctttagctgtaattaattattcattaatgacatgctaattgcacaatacctttgaatatttaacaaaatgcaaaaaccaggctctgaagttatgtttttagtgcaagggggagaagattctttagtccatcactgtaccaggaggacaaaaaaaaagtcctttttcagatgcgaggtaaagtagtagtagtggcctactttccattcaccatctcagtcaccctttgtgccgtggaatataatgtccttatctagacttaacaattgacagggtggtaaatcccttgacttttgtccaaatgatttctctacaaaaatgggttaattatcgcctttccctagctttttgactaacaaaaggccctggatctcttttttcctttctttcctatttactgtaaggagctctttgaaatgtgatagtttaatcggcaacaccttctacagggggaatactgagaggccggcctggccctgcctggagctcaggttgctctgtgaacattaccgtggttaggagatatgacctttattatgccaaagccatcctggactttcaggatgaaaaactcctgagtgctcggtagtcgacttcatttgtttctgctaataaaagctggcgggtttttaacagtgtcttttagtgggtgggatgactaaagggcacagtgttgaactggcttagctgtgtttcactaattccctgcaagacagcgagtttgcatctttctgtgtcctgtctctgtttccaagcctgaaagctcctcattgtctctgacctgtaagtcagggatactcttcgtagtggataagcagagaagaggactggctttttttctttttatttgtcattatcaccctcttggtcccaatcagagaatcaccagcccctaatttagtacaaggcagtgagctgtgtggcagcttgtccttgtggttgagaatatatttcatgcactagggcctacttagtcatattttgcatttgactgccattactattaatggcatttatgaatgcacattggcgggaagaagaccccattgaatctgtgcattatcagagattggggaattagcatactccgtgtctggttcatgatggattttactgtgctgtggaaatacttagcaattaaatgagaaatcaccattgtgaacgtgcacctgccaggaaaaaaagaatggagtagagaaggaggggcattcactcaagttgacgccaagttccctcttttgccattgccttctctcatttgggaaatgctacatctgcctgtagccattgttcaacatggcaatatataatagagccactgtttagtaaacgcatggcatcacaggcccacccagccaaaagtgtgtcagggtcaaaagtgtttatagtcaatttggaagtcacagcttgcaaagtgaaaagtgaaataatgcaaaagtaatgtatgatttagtgccacatgaattagagagttcagggattgcaaagtggcaaaccatgcgttcagaccaacccagagtcagatgcattttacttggcttgaacttttttcattctaagttggagttaatattgaaaaattgggagatttatatagaaatctgactttccatcttctcttgaaaagtcagaaggtctaccaacatgggctgccagccatcccacatggcaacaattggccagagctaagtagcccgggcttgcatttttcatttgaatacctcacctgcctggaagtttcctactttggaatagagatttgaggtaggagtgactatgggttagagtgaacagggaaggatgacttttggacaaactccaccaaatacactctccacatgctggtggtatagtcatgatgagatttcagatggttcccgccactcatttatagccttttccttttccagagtaaaatgtcagagataaagaaggttgtctcccaggccactgaggaagtacttctttggctttctgcatggtcctcagaacggggccaattttactcgtaagacttcttgtatttcttttttagatctcagaatttgttttattaagcccctcttctgtgctagacactgggcggagcatttctcacacaaatccacttctttctggtcctgtgtgggctggactctagcagtagtcaatggaaagctttggactgctatagtggaagctctgcctggactgaagttttgttgtgaaataaatggcagtgtgaagaacaggttactattcttcatcggctactgactctaggactttagcctaccttgagcaccttttcttgggtacattcacttaggattaatgaatgatgttgttacataaaaccttgtttctgcccaagtcctgaagtgaataacatctaagggaagtaggcaggagtgccaagagaagccaatttcatcagtgttaattggagacctttgggccaggaaatagaagagcatgggtaatccatgtctccttagcccactgcctgtgtggaagccagcctgaaacttttgatgttacttagcaatattagggaaacatctgtgaacaggcaccactgtacaccactgggaattgcttaaaagtgatacaacgtgaacctgtcaagtgacaaatactgctgtgggagcatgacttataaactgtgtgaacacagttcttcctggaagtatggattgagctagggagcggtggttaccaggagagaatttgttatcctagtgtgaattagggaatgaatatctaacatgagacaactagagcaggggaattcttggataaatatgggtagggtgtgtatggcttagcgcacatttgaagttcatgactgagaagatttacttggtgaacatttattgaatagatacaatgggaaagcctgtatttgttgaaagaggcagatatagacatctaaaccaaagtaccacattggccagccatgtctagattgggtgtgggtcacctttttatcttctaggaaattatcttacttgttgaagtggcctcttttggaaaaagcctgaacatagtttgtctattgtgatctgttctttttcctgaagaaaatattttctttttagtttttaattttaaaaagtttaaaaagttgtttttgtagagatgggggtctcactgtgttgcccaggctggtctcaaactcctggcctcaagcaatcctcccatctttacctcccaaagtgcttgggattacagatgtgagccactgcaccttgcccataatgaaaacgttttaaaggaactagaagaatgataaatgggtatgccatcacgatgtggaaactatgataattcgaaaattaaatctgctcaaatgcttttgtggattgataagagacaagtgattatggatcaagtcattaatattcatcaatgtaaagaataagttggggaattatatagaattgtaaggagaacaggaaaaggtataaaaggggatataaattactattctcctatatgcacagacaaaaatcacaaatgtctagtataaaaaaggaagggccttgaaatccattggcatttccagaaaatattccatgacctactcctgttgcaaatgtgccttttaccattgcagggtgataaaatgccatgatccaactccagagtacaattaagggcttgtgtgatacagcaggcagccattccatacttgagagttttcattgtataattaaaataaactgaggggcgggaggcagggaatgaagtaggggaggaaggtccggctgaagcgtattcagacatgacattttctaatgtcgataaccatcgagagctcggcttctctgtccatgaagacgagaatgccacatgtcagtcaaaggcagggtcgctgagcagggctggagactggagaaagcaagggagggttcatttggctctgggagagcgcagaccggcctcttctcaggctttaattgtgcttcctttgtgtcagtggtgtccacgtccagatttctgaagatgagtcctgatgatacagagagatagcaggtagtgcaaatttggctctcccctttcaagctgggattctaggccatgcttaatcccagtggaatagataaaaataacacacccaaggagcaatctcagacttatgtttttgaaagccattttaagcaattttggcccttatacagtatgcttgaataatgcccctgctacagtggtttttttttttaaacattccagtgtacatccctctgtgaggggctctgtcactctatttatatcctgtagtaaactagcttcctctcctttggctgggcagcagctgccattggcctgccctcgggcctcccctacatcacagagacaagcatgtgtgtgagaagaacccagatctccccccagcaaagaacggaatgagggctccaacctgggagaatgtagtgatgttttgacacacccacccgtaccctccaccccgatgcaggaaaaactggaatctctctgttcctgtgacagtctgtcaattttgcttccagaatagttcttaggaagcacactcaccctctaggaatgggggattcatgtcttaaaagatcattacaagttcttcagtatatgctgaaatttttttctgttgcagtgctggaggtaaataccaagagaactagtgctttaaaagcaaaagctggttgttaatggagtaaggatgcttcagcgatttagggagggaacttttaaaagggggctccacatttctcctgttctccttcaacctccatttctacacaggaggtaaatgattttcatcccaactctttactttcgtatttagctttgctcagacatgattacttctcctttacgatttctgttggctgctatccctctgtgttcctcctgaatctagagttatagattgtcatggcatagattagagaaaaccttaaggaagttcccaggcaagatggccgaataggaacagctcctgtctgcagctcccagtgagaccaatgcagaaggcaggtgatttctgcatttccaactgagattcccagttcatctcattgggattggttagacagtgggtgcagcccagggagggcgagcagaagcaggacggggcgctgcctcacctggaaagcacaagcagtcaggaaactccctcccctagccaagggaagccgtgagggaccctgctgtgagggatggtgctatctggcccagatactatgctttgcccatgctcttcacaacccacagaccaggagattctcccggttgccaataccacaatggccctgggtttcaagcacaaaactgggcggccctttgggtagacaccgagctagctgcaggagttttttttttttccataccctggtggcgcctggaatgccagtgagacagaaccgctcactcccctggaaaggaggctgaagccagggagccaagtggttttgctcagtggatcccacccccatggagcccagcaagctaagatccactggcctgaaattcttgctgccagcacagcagtctgaagtcaacctgggatgcttgaggttggtggggggaggggcatttgccattacagaggcttgagtagatgtttttcccctcacagtgttaacaaagccactgggaagttccagctagggggagctcactgcagtgccacagagccgctgtagccagaccgtctctctagattcctcctctctgggcagggcacctctgaaagaaaggcagcagccccagtcaggggcttatagataaaacttccatctccctgggacagagcaccttggtgaaggggcagctgtgggtgcagcttcagcagacttaaacgctcctgcctgctggctctgaagagagcagcagatctcccagcacagtattggagttctaataagggacagactgactccttaagtgggtccctgacccccatgcctcctgatggagagacacctcccagcagtggtcgacagacacgtcatacaggagagctctggctggcatttggtgggtgcccctctgggatgaagcttccagaggaaggaacaggcagcagtcttggctgttctgcagcctccgctggtgatacctaggcaaacagggtctggagtggacccccagcaaactccagcagacctgcagaagaggggcctgactgttagaaggaaaactaacaaacagaaagcaatagtatcaacatcaaaaagaaggacgaccaagcaaaaactccatctgaaggtcaccaatagcaaagaccaaaggtatataaatccatgaagatgaggaaaaaccagtgaaaaaggctgaaaatgccaaaaaccgggatgcctcttctcctccaaaggatcacaactgctcgccagcaagggaacaaaacaggatggagaattagtttgacgaattgacagaagtaggcttcagaaggtgggtaataacaaactcctttgagctaaaggagcatgttctaacccaatgcaaggaagctaagaaccttgataaaaggttagagaaattgctaactagaataaccagtttagagaagaacataaatgacctgatggagctgaaaaacacagcacgagaacttcccgaaacatacagaagtatcaatagccaaattgatcaagtggaagaaaggatatcagagattgaagatcaacttaatgaaataaagcatgaagacaagattagagaaaaaagaatgaaaaggaatgaacaaagcctccaagaaatatgagactatgtgaaaagaccaaatctatgtctgattggtgtacctgaaagtgatggggagaatggaaccaagttggaaatcatccagaatatcatacaggatatcatccaggagaacttacccaacctagcaaggcaggccaacattctaattcaggaaatacagagaacaccacaaagatactccttgagaagagcagccccaagacacataattgtcagattcaccaaggttgaaatgaaggaaaaaatgttaaggacagccagagagaaaggttgggttacccacaaagggaagcccatcagactaacagcagatctctctgcagaaaccctacaagccagaagagagtgggggccaatattcaacattcttaaagaattttcaactcggaatttcatggtaccagtaccaaaacagatatatagaccaatggaacagaacagaggcctcagaaataacaccacacatctacaaccatctgatctttgacaaacctgacaaaaacaagtaatggggaaagaatcccctatttaataaatggcgttgggaaaactgtccagctgtatgcagaaaactgaaactggaccccttccttacatcttatacaaaaattaactcaagatggattaaagatttaaacctaaaacctaaaaccataaaaaccctagaagaaaatctaggcaataccatttaggacataggcatgggcaaagacttcatgactaaaatactaaaggcaattgcaacaaaagccaacattgacaaatgggatctaattaaactaaagagcttctgcacagcaaaataaactattatcagagtgaacaggcaacctacagaatgggagaaaatttttgcaatctatccatctgacaaagggctaatatccagaatctacatggaacttaaacaaatttacaagagaaaaaaaccaacaaccccatcaaaaagtgggtgaaggaaatgaacagtcatttttctaaagaagacttttatgtggccaacaaacatatgaataaaagctcatcatcgctggtcattagagaaatgcaaatcaaaaccacaatgagatcccatctcacgccagttagaatggtgatcattcaaaagtcaggaaacaacagatggtggagaggatgtggagaaataggaacacttttacactgttggtgggaatgtaaattagttcaaccactgtggaagatagtgtggtgattcctcaaggatctagaaccagaaatacaatttgacccagcaatcccgttactgggtgtatacccaaaggatcataaatcattctactataaagacacatgcacacgtatgtttattgaagcactattcacaatagcaaagatttggaaccaatccaaatgcccatcaatgatagactggataaagaaaacgtggcacatatacaccatggaatactatgtggccataaaaaagaatgagttcatgtcctttgcagggatatggataaagctggaaaccatcattctcagcaaactaacacaggaacaaaaaagcaaacactgcatgttctcactcatacttgggagttgaacaatgagaatatatgggcacagggaggggaacatcacatgctggggcctgtaggggggtggaggacaaggggagggatggcattaggagaaactaatgtagatgacgggttgatgggtgcagcaaaccaccatggcacatgtatacctatgtaacaaacctgcatgttctgcacatgtatcccagaacttaaagtataataataaaaaagtaaagaataactgatgaatttcaaataagttttgtctctcctgcttacacaaatcaattgcttgtggctgcttggagtgctttgatgggaagtctaggaaggcgcagtccgggctcagtggaaatcagtgtgatgataaagctttccctgcacaagagggtctggcatttccaactgctgattttgcataatcttattttctatagattatgagagaaatgattataagtcacttgattgacccaaacatggagcagttgtgctgcatagaatatttcaatgccttctttcccatttcagggtccctggcgccccctgccctccccactattctgtttcccatttcagttgagatttcagagatggttcacagttttcccaggaattcagacttctgcttagaagaggcactgccacactcttaggtaaaatctgctcagcttgcctccctgattctagaacccagaatgattctggaagttatgttagaggtcttgtatgcatatgtcaagagagacctgttctgtttagaagcttttctggggagatttggatccagttatggatgccacgtataatatatatcacaactggaattaattacttctttctgtaattattatatagcctttcaccttgctagattttaagatccaaaggagcactgcttttttctctcttgtgtcctcagagcctggcacagtgcctccggaatgtgtgtgtgtgtgtgtgtgtgtgtgtgtatccaataaacacttgctaaatgaagtgaatgaatggttatcagtacacttttagactctggaagttagccctaaagattccctaaagactgtctagttagaatgatgactagcctatgtgtcattctggcctctgtttgcattaatgtgacctcctgaaagacagaagattcaattcgtcagatgactgccctggattcatttgtgactcatgatcagtctttctagtcacctgaaacagtcttttctctttctttccctccctccctccctccctcccacttccctcccttcattccttcccccctccctcccttcctcctttcctcccttcctcccttcctctcttcctccttccctccttccccctccctcttctactatcttttctctttctctcctctcccctccttccccctccctcttctactatcttttctctttctctcctctcccctcccttcttccccctcctcctccttcgaccacattcttgcaacaacacttgccttgcttttgccatttctactattctcttctggagatgtatggcgccaaccctgggtcattgtagagcctttctagatggccactctattccagcatttctccttacagtgtattaaaccccacgggctggaactttcttaaagaccactttagtagaccattcctccttcaaaaaccttcactggatccctatttccttgtatttgaaattaaagtctctatttggaattcatgataactagtaatccagtcccacttacccaattctaatgtccagtgaagcaaaacaacatacaatattaataaggactctcatttgttgagggcttaccacgtgtcaaacactgtgctaaatgtttttttcctatggggttccagctactattattatccccaatttataaataaactttgtaaagctaaaatagctgaagtaacttgcccaaggttacatgatgagtcagtgatagaactaggattgaatgcaggtggtctgatttcagagctagggctcttgacagttagttaatgatattatatttgatgttctttgtatattaccagataggggtttcatatatacagggacacaatgctaaatgtgatgatatcttaggacactgcttcacaatgagataaaagtattaaaaataagtactgtgtatatattttattttatatagcacagtttgtcagagaaatcccctaaatgatatatgtattaatatctgaatttttacccactgctttctttctcattttcagtgtttgtagtgaaaagaatattgcatatttataaaatgcatctttctctaatagtcacatgccttttgtttcctcagaaaactactaaagacatatcagctgggaaactattcacaactataccaaggcttttgtttactgatccttcccatccgacgaatcacttcaccttcagagcattagaaaagaggatgtatttaagtggcctaggataccacagttctggatacagtagtagaggttgttgcagttattactactccttggactcatcaccatctgatgtgggacccctaatccttgggcaaatcctgccctttggtttcagcaggggtgtggactgagaaagcatcctgcacacaggtgaggcagtttgcaggtgctatcacacccccactataccaaggctttgttccaagatatatagcaaccaaatagcataacaaaatggttaagatcttgggttctagcatctagatcttaaaatctaggatcaaggatctttggatccttggaagaagcagttaagtttggataattcagtggaaatcctgatgataaatgtgtgcatgagtgtgtgtgcgtgtgcccctatagagtgtgtttaggaggaggacagagacaggatgaacgaatatcttccttcgaaacttgcagtgttattaggctctgactatagatggttccattgtattggttcctttgcctctgaaaagctgggttcttgctacaagaatttatgcttgagaggtttgctgtatttgtacgtgttcctgattcaacgtctccagtctgcattgtttgggtctaacccctcacattatcattcttcctcaaatgtgtgtgtctggaatgagtgtctctttcactcacagcaaacctgaggtgcgtgaatggtttacagaaaagccccacgtgccatatgttcatcttttttctgtccaccccaatacagctggtggtagtcagcaacagatgattgttttcagttttgtcttttcttgaggctaagagctttgccctaatgatcttcaaggtggttgacattttcaattaaagtctgctctgtcagacagacataacttctcacaaaaagctgtcaggagctgtctcctacccaaatgttacacagataatgattataatcataattggtttcaattcatatacaggccatcctttcatctggagtggttttattccagagatagtccaccaggaagtgtcctctgttggggattcactttccattggagtccatcctccatttgacctgcggggggggggggggggcggtggggtgaagggggtgcagtcagaaggctaattgtgtggaaagagcctgttttatcttctctccttgtaaaaggctggataaggtggcctgtatgaacttcctgtctttgatgtctccctgagaatgttccaagaacgttccaagaactacagcagccaaatagcacagcaaaatgcttaagatcctgggctctagagtcagacaaacctaggttcaaatcccagcttcaccacttgccagctgtctggccttggggaagttattttacctctttaagcttttgtttactgatccttcccatcagacgaatcacttcaccttcagaacattagaaaagaggatgtatttaagtggcctaggataccacagttctggacacagtagtagaggttgtcacagttattactactccctggactcgtcgcgatctgatgtgggacctccaattcttgggcaaatcctgccctttggtttcagcaggtgtgtggactgagaaaccgtcctgcacacaatctccaagttgttcagtcctcttccaggtgaagcagtttgcaggatccatcacacccagctccttggctagttgctttgtggttctcttactagcaaaggctgcagctggtgattctgctaaattgaagtgagaacaagaaaactctcccagaatgcaccagggcgaggcaaggcactacagctacccgccaggtaagtaagtactgggtgctgcagttagaaagagagcaggaaagcccctgggtgaagcctttaatgaggagagtggtaagagggtataagtgtattccttgagagggtataagtgtattctgtttcagaattccaaattggaatattcagacttcataatccatggtgtttgttagcttggtagttgtgcgcctctgtgggatcctgggctctgtgggtccaagaaggacagatttccatgatgacattttgttagatgatttctgaggtaggagctacctcgcagcctcccccacccccgcccggaaagcagacacggttaatcctccatgactactgatattcgctgattgagtgcttaaaaagtggcagactaaagattttcctacaattgtagtgcagatgtccacattccaccaaatcataccacagagcaaagtctgattatgtcattcccctgtgtgcataataaacccaaacttgacattcaagataccaaatagcttcccttttaactaaatttcaattaaatccaggtttgagccaggtgtgctggagattttccattttcttgcccttgcttattctggtctgctgatctggtatacccattttctggtcatcatcttcacgttgactaccagcctcttctaggaggctttccagctccctctaaggcagctggaagtactcatcttgcctctgaatttccatagcatgtgtccatgtcttctggcactttcagctttgtactttggagcacaggttatttctatgtgcatcttttctctgtctaggctataagtccttgagggttagtttctagtttatctttgtgtttttcagaagactcagcccttgtcccgcacataataagccctgaggtacatgtgaggccaatgagtagcaccaagtgcccacgggctccatttaatgtgctgctcctcttgatttatttagatgcataaaagcacatgtgtgccaggtcttgaaattacagcagaaaataatatggacacagctcttgctctcctggagactggtgggaaagttggaccagtaagcacacgttatgttcagtgattccatacttaaatccaggatgtcatagatgtctcttggaggggccctaagctaacatttaagggtaggtcctaaaaaaagaagagctttgagctttgaaatgttatagactgaaagtttgtgtctttccaatattcattatttcaaagctccaacccccgatgtgatattattaggaggtgaggtttttgggaggtaattaggtttagagaaagttaggaaggtatagccctcccctgccatgatggcattaccgtcttcataagaagaggaaaagagaggagagcgctctctctctcgttctttgtgccatgtgaggttgcagcaagaaggcagccctctgcagactgggaagagagccctcagcagatattgaatctgcagcaccctcatcttggacttctcagccttcagaactgtgagaaatacatttcctttgtttatcagccacacagtctatggtattttgttatggcagccccagccaactaagacagtaataaagatgggaagagcatgagagtgtttgggacagagggaacagctgggacaattcccggaggagaagggaacatagcttgtttggaaaaccctaaatagcttataatgctggagcagaggaggggaggaggggggtgaaaggtgaagctgcacaggctgtcctgggtcagggcctggaaggcactagggttcatgtcagaaatgctggactctcccctgggagcaaaaaggaggtgattgattaattcagaggctatgttaaagtatcgcaattttatgttggttattcaggatctggcagtaaggataatgagtttcttttgaattgaaaagggtctcaaacaaaacaagaacaaaaccaaaacaaaaatatcaagattccaggagcaaagaccaaggcacttgagccggagtgaaaattcctccttcaaagaaaggtacattttgccttatagtgtgaacatgccaggtccacgacgagacattattctcatggctctgactggcagccaggagccatggaggagctcttgaagtgaatgggaatatttcttgagtggtttattgagaaagcacaatggccaaggggtgggtgtgggggacaatgcttcaggctctcgccagtgggtgcctgatgaaatacatcttgacgtgtcattgaagtgtggagccgtgcggccccgtgaggtcacctgtcccaccccctgcccaggcagattattcctcacactctctttctcagctctttgtccagtggctttatgcacctcaagcgatggggcttccactgcctcccttgggaagccattccgcactcgaatagagcccgctcttaagaaggttgccctgatattcagcccaagttttcctttctgtaattacatcccattccgctctgctctacccctttgcgtgaccctgagcaattctttcccttcatcggtgtgcctacacccttgctcagggagagtatttgatcctcggttctttttgtcatccctgagctttgcttattcctggctggtgctgcgggaacccttataagtagctcctgctgctgttctctttaatcctcgtggcttcccttctttgatttctgtccaatttgcctatttctttcaggggtactgaagggcccagaatgaatccgaggcttcctaactatattatttattaatattttatatggaagaccttctcaatgatgctaaaccaggttgggtggaaaataaaaatctctttgaaagacggagctgatgtgaactccctgtgataaggactctggacacttcagaaaaaaatgagtttgaatgcaaggaaaagtacccccacccagtcttctgatattcatgcacctgtacttcattgtactattgagggcagaggaagcatgaatttaggccaccgagagactgaaatgaccctccccagtcagtcgcactaagtacagcctattctccaagccaagctttcggttgccctcctccatgaccctctctttgatctcccctaacctctactttggtataagcagataaaaacaatccctccttcctatgactagccacagtacttttgcagggcttgctttggtggtacttcctattctccattttattcatttacccatccagcaaacatttatctcgtgcctactctgttcgtgatactatggctcatactgggggaagtggaagatcaacaagattaaggttacagggcaaaattcttgccctcaaggagtttcccatccagaggaggaagccagtgcatagctgtagacagatgctggagtggaaatgtgctggaaaactgcatgactatgaaataggagtgacttgcaatagattctcattcttgttgtggattgtgagcttgcaaatgtgggaagggacaccgatttatctgggtaagcctacgaagcctaccgtgtgccatccacatgctgatgttagtatggtgcactcatatgtgccaggcaatgtgctaagcactttgtatgtgtatgtcatttagtctttacaactttaggtactattattacctttacataggaaggaggaaaccacgtctctaggatacaaagtaacaaacctgaacctgaagtcacagaggtggcaggtggcagctgagtttgaactgagaccctttgcctgcagtgtctgttctcctgtgctctctgctatatatatgtgggtcatccattcatgatcagctgagatgggaaactgaggcaggaaatatggttcacaaggtagctaatcaaagaccattttcatgtgttatcccatgtcacctcccctttgctggtcttggcaaaaaagcaaaaatggaggtagcaaggcattttgtgttgtcagacacctagggaacatgcacatatatttatttatcatttcattggttgctttggaaagaggatggaaaaccaagcctctccttttttaaaaaatattttctaatccagtagcatcacataattcaaccagtctatcttgggctattgaggagcagagggatctgtctcagacaatggccacccagtgcaaagatagctgaataaaaatgaaatatgaatcatctacttatttgaaaaacctctgggttcttggcagatttttggaatcatatatattggctttttctggcatatacccagcacagagtgggtgtttgtcatgaatttgtttaaatgaatacatggtccctacttcagatacattttgcacttttttgggtgagagttgtataaatgtgctccagccaagaaatggctcattatagtgatgggaattgtgatcatcttaaacagagtcactaaagggaagaaaataatcatgttagtttgtctttttctatgtgctatccttttgataaatgccttttttgggagatgggtctagtttttcttctgcatatgttttctaatcatttgtatgtatctgtgtgtgcacgcgtgcacatgcagtgagtctgcagcagtggatatagggtgttctaccagctggcctgccccagttcacttatgctaatctgggagtgggacagcagcacctgtgcccatggctccccagaggcttgctgggcaagcggggtggctgtgctgcagcagcacatttgcgtctccggaatgtgtcctcagctccttggtgcctctggactgtgctctctgagttcaccttaactgtgccctcggaacacagcctctgactggctgctgcctccaagatgcctctggcaaacgccttgttctcatcttctcttgggcaggggaataggatgaggggcggggagctggatgaaggacacttgcctgcccgagcacctccattgaggccaaacaaaaactgggtccaccatttcccaagaataaacactagtgccaatttttcttaaatgtattttaatctaatagattaaaaaatgtagtgtagtcagttacatcttaggctctggagccagcctgcctgggttgcaccctggctctaacacatttttgttgaatcttgggcaaattaaactcaacaagtctgtttccttttctgtaaaatggggataatgataatgtctgccttgtagacttgcaatgagtgcaatcatatacataaagaatttagctcagggtcaggctataatttttacttactgcttcttctgggaaggacatttagtgaatactatgtgccaggcactgtgctaaacgttttacatatgttgtctcctttgatcttcataacaacctactaaggacattgaagttatttgactaaataacttgtgggaattctaactcaaatagttatgaaattaacagaggaaaaatgtttggactgattataagttctacagtgccagactctgtactctttccaaatattcaacactgcccattgcaaggtctgtctgagagttgaattttgagtgagttatttgaactacgaaaaacctttgaacttgagagctggagaaagaggaagaaaaaggtcagtcccaagatctttcactctggaagcttccatttctctctctttcaaatgacctcccctcatatctctacagagtggtatggcatgcagtcttccagataactttaaggagacaattcagcatggcgatggtgggattgctcttgtacgagtgtgtatgtgtgtatgtgtatgtgtatgaagtgcactgtactacactggcattgcagaggttgttgaatgaatgaatgaaggaaggaactaatatgcatataaatgacacatggttctaaagtgagattcggctcccataagtcattcaggagagtctgtgtcatccctttaacctggtaatcataccacatacacactcctacacccaacacacacacaccattctcatttgcctgtgtgtaatgggcatggtgaaatctgcctgtggctccatatcatggttttgagattctattttcaatagtacgatagatactgaatgagggcaagtttcgtttttgtgtaattcaataaaagagcaaaatacaaaaaagagtcattaaagcattgtgacatcaacgcagactgtcctttgtggaagtgcaaagcagaggaggtgctgtgtttactgaaagatctgtgctttcaatttattcatttgggttcttttgttttggggtgtgagcagatctaatttatttgtttttgtatgcttactttaaagtgaaaaagaaacctatattgaatgcctactatttctccagctctgtgttaggttacttagcttttacacaccctttgagaaataaggtgagtgaccattggctcagagaggttaagtcacttgcctgaagtggcagaattactaagcaacaggacaaagatgcaagtcctggtctctctgttctcagctgtctttcttcctcctcatagctttgaaaagattcaaacaaacaatcagtgaaccctttaatgagtagttgaattttatttactctccagtagggaaaaatctatattatttttctgagcatctccaaagcccacataaatcctgttgtattaagaatttgattgggaaaatgttaagcatacaatttattgatcccctcatctccagctgacaagatggcttgttttgtgcacctctttcggtgtcttcattttagttgtaattatgttatccttcataagaatgatggttgcctatagtggtaagttttctacctgcagctgaactatccccgcttcctttagcaaaaagcaatttcaaacattttttttttttgaaaaacagtctctgggaaaaagtttacatgtcaaaatatttctcccagtttgctttgaatttttagttttcaaaatttaagtgataccccgtatgtatgtattgacagtttctcactgattaggaagaaaaaaattaaaaaaacaaaagagtaaatgaactgagccttggctacaattatcctaagcccagtgaaaggaaaagtggcttcagaagttctgagggatcagagaccagggtgtctatcactctgtaaagtgagtaaataaatccttcaaggaaaatatctacccatgaggatcttggaccatgctaagaaatgatctgggctccaaatgttacactcttgtctcatgtgaatctacaggcaactttatacaaactgaggtaactattatgggtttgatgtacagagatacttttaaaggagtgttctgggagtgccctactaaaagtctcataatagcagttccagcatttcagtaatctctgggcttgaatgtggctaaatagttatgaagttcatagaggaagtatgtgtgtttggactgattatgttataaattatgtaatgatataaattataccataatataaaacttctaataacatctgggtatattctaaaaaagacatattattgaattattttataattttcatatttaaaatgaatactttttacaaagtataaagataaacattaaaattgcctttcactttatcttccctcaataaccactgttcacgcttaggtatctgttttctactcttttattttattgcttacataaatagatgcattgaaatttatgaatatgaggacatatgtgttatacctgatgttacatctttagccctctccttgttgctatttttattaatatgcattctgagaacacatgttttttaatgactgtataatattgtatcatgtggatatatcatcatttatctaaccaatctgcaattgttagacatttaagtttttaattttttcatttttataaataatgctttgataagcatccctgatttccttatgatagattcctagaagtgcaattacaggctcaaaggatatgaatgttttcaaattcttgatgcaataccaaagtgcttcccagagaggctgtgccaatgtgtgctccctcccctcccacgggtgagagtgcccatccactgtatccatactggtgctgagtgctatcattacttgacatctttgccattttattaaagagcatatggctggttgctaaaggtaaggtggcaaacaaaaaaaactgtgaagagaagcagaagtttaaattccagacaataaatgaaaattggtaaaggcatctggttcttctagaaacatccttccattaatttgtagatgagtatctcctatttctaggaggatgtgtcaacatttcacagcctcctagagtattagctgcccctatgcctctctctatatattctcatctggcattaatgcacattagatagggatttggaatgtttaccaccttgttagaacttctgagccatttctaatttctttcctatgctgaaccctccaataaaaagcaagtgactgtttatataatattagagcattttgaggtacctctgcagctaactagtttaaaaatgacaaattaagtcaaagtttgatttgctccatgatactgatgtttgcatttcctgagatgtttcagggaactgactaaaaattttgatggagacagtctttgagagtgttctaaaaaactccacgaggtcatctaattcaaccccttgctctaggatcaaaccagcccaaaacatgaataccatgaggaaggaaaacaattttcatttttcattcacagtagttaagtgtattgacaaaatcccccgaacacctgctttttcctgatctgtggctgggtagtcagtaaataagtgtggagtatgttgagcttactctgaatcagcaacaccgctataggaaaaatagtgaccgctttaagttataaaatgtgatgggtcagaatggcttttctttggcatttaaaaaaagtaaactagaaatgggcagcttagtgggaaataattactgttggctaaagcaggtgagatatgggactggacctgctgctttgatgaagagtttgctgtgcacagcatcatcatttccatcgtaagaaaatcagagatgttcagcaaagcattgcttataaaaatgaaagattaaaaatgtagatgtctaacactggacccccatttgcaaagaaacaggctgccatagaaacactgtagagctttttagtttgtgcaagatatgaaaatgtgtttttttttttgggtaacctgagaaaattaaaggagaccattttgaattgcagaggtggtatgacttggtgagattggaacagggcttatacttgctttgcctctgacctgggataaattactttgctcagtttaccttatctgtaaaatggaggcattttaatacttgccccccattagatgccttagaaatgtgaacaagcattttgaattcttatgaagaaggcagtgtggaaattcacagtgtgataaataaattcctaaaatgcatcatacaaccatacttgtgtttgggagactggaaccattttaaagaaaaaagtatccaaagtatcccattcttgttcaagtcaaatgctgaattgtgtagtggcacagcctatgctaccagggtaggactacatagctttacctccagggcatgggaaggtgggcagctcagtgtgatcagaggcgcagaacctgccgcatgatggccaggctcagaggagcatctttttacccatatcttgttgattccagctttccttgattagtcatttgcatgctcatttttgttctgttcctctctggcggggtctgttaattactaaacatgggagacttaacaaccaaaaaaaaacaaacaaaaaaaaaaacaaaaaaactagaaaacagctcgagccttttttgctcaagttttgttttaggtccagtaatttgaattggcagccaaaggaaaaaaaaaagtaacagatacacctgactaacttgcatttcgtatttctaacactcaaaagtacaatgcttatggtaatgaattttatctattacgagggaaaacaatcacctttgatgacattatagaataaacacatttaacagcacgctgaattgctgaagtatcattttcaacgacctcattagtgtcacttaattaaaacttcctgctcttgactttgatgctggtacaggcaaaaacacagagggaattgaacaaacaacaaaaaaggtgtagggggtgcattttctagtgataaatcgcagaggttgctaatgaaaccgaattatgtacctttttcctgcaactcccataaaataatctgaaacacgcagcaactttgcatcaaacaaattaatcagctgtcagcagatttgccttataataatcttttgcacttattgatcatttaaaaaggggaggggctttttttctctgtacacaagcattaggttggtgataattaaagcctcagcttcagaaatgccataataactgttaattagcaggatgctattttcaacataatttgctaattaggcagtgagctggtatagtgtatatacctaattatgaagggtcttgtgctgtagacacatgtgactggagtgtaaatgacaccattataggggtcctagcagactttttaaaaatatagtttgttcagaagtacttagttctttagggacttcttcgtatagggaatattactcttggctgttttgcatgaggcttagaagaggaaacattatgtagaaatataccatttcttttatctgtactgtggacagacagggtcactaattctaaagaagctttgtcgcctgatgcctgatacaaaggctgataatttaggcactgaagttgtacatactctactagtagagaattactctctgtttgcttgccacacgcgattcatctgtggaccaggacgctctaaatcttttaatattatatgtctgccatactttgatttttctgccacacactgataacctataacatgtatctctctgcctctgtctctccctcctacttttcccttcatgtcataaagaaaatctagacttttcgaaaatggatgtttatttctgcctggtttcttctctagcccagtgtctaactgtcttgatttttaaaaaaagatttaaaaatttttaaaagagaggaatgataaaacacaaaaagtaagggtgagctgtcatgcaaaagtctcaaattatatgcatattagcaatatttatgagtttaaatttggcttttcagcagagcataagcagagtgagatcatttgcagatatataaactggcttcctggatcataatagctgatttcttttaaatgttttaccttgtttcaaataaaactatatttctttattccctttaaacgaaatgaaaacttaattcaataataaatgagcttcagagcagcacaagagtcacttaacttaaatctttttgtagaggttcccacttaagcggcttgaaagacagtaaatcacactgaagaatggacatcccaatttcattgctgcgctgtagagagctgaattaatggccttctctttagaatgtatggatgtgctttccagctgctaagcctgacagtgttatagctcaattaatgtgattttgatgtaattgcagatagggagcatggtgccaaaaaattattttttttcataagaatcacattttatcatccagatgtgggcagaggggtgctttttaaagctgaatgtgataagtaacagggctcctatttctgtttttttgataatatatttctgaaaaaggggagaacaatgaatgaacatatttatttattgaacacttactatgtgcccggcactgtgctaagcattttactctaacatatcatttgatctttacaagcctatggagcaggtcctattgtcatccccatttcacagatgagaaaaatgagtcaaagagagatcaggctagtagaggcaggcctgggagggatttgaacccttatgtatctgacaccctgagatcataattaaccatcatatggtttctctccaagttgtcctcagaggcctctggctggagatagtaggatccataaatgtttaaatggttaaagcaactttttagaacattatagagtggtgttgtgagaaataggttttaggcaggctgcctgggtgtgaagcctagatctgcagatttctagctgtgtttgattttaggcaatctgtttaaacaccctcatcctgagcttcctcaactgtaaagagggtgtactaatgatggcttcttcatatgatttgttacaaagattaaatgagagaatctgtgtaaagtgttcagaacagtgcctggaacatagtaagtgatagcaaagataattgatagccaaacacaagccagcaaggtcattgatctcttccagtacagttttctttgcctcatcttatctattgggtgcagacggcctctgggaacttggctgccaatattttctgggaagtacccagaatggcatttagcatgatatgggctgtgcctgctggcattgatgtgaaaaaggcctttcttttttgaagccactttaattcctgtattattagaatgaataatggtgctaacttggaaaatgataagctgtgtacttgctggtatatatagcattacttgccagcccaagctctgctcatagatatgaggaaagcactgaatttcaggcactgtttggggctccgggacacaagaagaagaacaaagcagtggttcatgaactgaaacaaaactcaggacacctcttgcattcatgatagaagatctagttaaggaaagagcacggagaaaaatgatgacaacatcgatgatgattatgatggtaactggcatgtaatgagtgcttactattcgccattctgcaaagttatcacattcaatgctcacgatatttctacagataagaactagtgttatccctacttatagttgatggaaatgaacatcaaagaagtaatttgtccacagtaataccgctgcaaatctttttatgcatcttctcacctcagatccacattgcatagatggggtgaagccaccttaaatttgccttgagttatgggtgaaggcaggtagggtcaagaggcctggattacttttatttcttggcattcattgcatcaacaaggaaggcttgcttttccactggctcgttgctttgtaaataataacgtcctttatttgtggttgtattgattcggttgcaattaatacattactaaagtctgtatagacaacttattaagagggctattatttgtacaataaatcctgggcattttcattgctgtggaccaataatttaaataagatagttctttctttctttttcttttttcttttcttttttttttttttgaaatgtagtctctctgtctttgtcacccaggctggagtgcagtggctcaatcttggctcactgccacctctgcctcctgggttcaagcgattcttctgcctcagcctcccaagtagctgggattacaggtgtgtgccaccatgcctggctaatttttgtatttttagtagagacggggtttcaccatactggccaggctggtcttgaactcctgaccttgtgatccacccactttggcctcccaaagtgctgggattacaggcgtgatccactgcgcccggccaataagatagttatttctaataatatactgggttggaacattttgacatctaataatcctaatgtgtatggtgatgtcattgtttcttattgttaccttcagaatcaatatgcaaaagttaatattaaattttgacatcacaggggatgcatttattaagatataacaaatgcgctatcatttgcttataagtagacctaaatagaaatgagctagggtgcttggtatacttgttgaaatacacatagatatgaagagttaggctttattatttttatagaataatagttatggaaaggatttttgggggtttagaaatataacccttatattaaaggcacatttcaatggtggaagtataaataaaatgtattaagcaggcactatttgcttttataattttgtcttgaagtaaacctccaactttgaagctattgaaagaaattcctcttgtaccattttgattcattttctttttagagcccaccaaactttgttcctggacacatgggtagtgggaataatattgtggactgtttctgttcttatgtattagcacactgattctcttccaagagcatgaccttctcagtttaaaaacagttgatatattaattagaattaagttaggttgtaattaattcccactcatctccacccaccacactcctaccaaataacagtagcttaagtaacagaagcttgcttatttgtttgttttcctgtttaggaaatctggagatggtgcagtgtggggtgtggctctgtgatgttggggccctggtttctattttcttctgttgtgcatggctacaattcccaaggtcacctaaccatcagagagagttgctggagcttcagcctttacctgcacatggtggccagtggaaggaggaaggagagaagaagagggagccctttccctttggagatctttgaggaagttacacttatcacttctccatgcatccattggtcagaattagtcacatggccacaagggaggccaggaaatcttccatttatctatccagttatgcaccattcatttacttaacaaatatttattgtatattcactctgtgtttgctttattcctggcaataaagaggtgaacaggcagacaaggcccctattctgatagctcttgcatcctagcagggagctagacaataagataaaagtgatatgtgctgtgaggaaaataaagcaggttgatttcataaagaggtgattcatggccaccgatagggattactttagattgggcagtgagagattccctttccagaaaggcgacccagctggtgaatgcattgattttgggtgtgaggagaactatttcaggcagtgggaacagcatgtgcaaaggccctgagattggggtgagtttagtttatttgaggaacagaaagaaagctgcacacagtggcaagagatggctgtagaggagtaggcaggagtggggccatgctagagattggatttccttctaaaagcagcaaaaaccatttagaggggaggctaaactacagaaaggaaggatgggcacgtgattcagtttatcttttttttttttttttttttttttgagacagagtctcgctctgttgcccaggctggagtgcagtggcgcgatctcggctcaccacaagctgcgcctcctgggttcacgccattctcctgcctcagcctccggagtagctgggactacaggcgcccgccaccacgcccggctaatttttttgtatttttagtagagacggggtttcaccgtgttagccagtatggtctcgatctcgtgacctcgtgatccgcccgcctcggccttccaaactgctgggattataggcgtgaaccaccgcacccggcccagtttatcatttttaaaagatcattctgaatgccacatggagaaaggtgtaggaaacagacctatgatgctgcctcactcagctgtggctggtgtggggagagaaggatttgccctctgcatctatgtctatgttgaacaaatgaaggagattttctttgtccagtggcatccagggatttgtgttctgccaggaccttacgatgtggcttttgcaacacactgaaaggacctgcatgttacagagacatgagggaattgcgtggaaaacctccttccactctgcagcatctggcatgaggaaggtagtgagctttcacagcgaaaaggcagaaagactgcaggtgaaatggaacaacagcccaccacgtaatttgccttctcggcaaattgtttacccatcatggggcagagctgatgtagatgggctgcctgagccccagggtgaacccaggagtggaatgctaggggataaaaagttagatgactaaaaactttgtcttgtcattctcacaagggacaatgttttgtgaataacacatctgagctgcggagaaggtctcaagggcttaaaactagtgattaaaacagtacaactctgtgtgaatgtagtttcaagtaagaccattaaaatgttgctgtacccaaaaaaggctaaaagaaagaggcagtaaacaatgcccaggtttggcttttgagctcagaggtaattgcttttgaatcttccttttgactggtccatcactagttcacgaaatttgagatttgttgattcagaatcattgagacttggatctgaaagggaccttacagtgaaatgggctgggcactggttttacacatgggtacaatttgagacccagaagaggcgtggcttgtccagtttcttgatttaagctatttcctctagagcagacttaaggaaactaatagtatatccctttggtataacgtggcttttttcaaatcccacctcccgccacccagcactttcattctttgcccgatattgcagaagctcagcagagctacatggcttcaacaaaactaaatttcctgttttgtaataaaattgatggagcgatctgagacccaccctccataataaggcaaaatttcttaaaatattttgaaagtggcaatattttctctaaggaataactgaaagatggattcattttcatcattaaatatgggatgagaatgccagataagttttaatctgtaattttaagagaaggagagagaggaggagatgatttttatggataaagtaaggttggggatatactttgaaaaggaagcttttcaggcagctgttaaaatctttaaaaaaattttacccccattggaagggtgttacttatcacctggacctggagaattttagagctttaggaataaactgacagttctctgattctgagcagtctagctttgctttgatgaagaggctaacgctcttcctgggttttgctggaaagccccaaggccttcgggctccacggaggggctttctgcgttcaaatcgcccctcctgctaatagaccacctaattggctaattgtaggctcagccattcatttcggctgcaattagccacttacttcttactttgcagatacaagtggccacttgaattctcaaaaagtccattgtgaattcagttatttgtgtgtctcattccacctggacagagagtggttagaaaaaagagtaaaataaaataaatgatagtccttgaaataaaatccctctgaaatctggctcaggctttctcaattctgaagtgacaataacctgaacagttcttttttcaaaaaatgcacattaaacataagacacacatatatcccagtaactggagacttaatttttctcttagtgtccataatgtagagcaagacatacccacctgctgtttttcagcttcttaactttccgtaaatctacttttccaacccttagatctgctgtgtgtaatttaattggctactgtacctttctgtataaaatgaatgtgctaatttctagagtgatgcattaattctctttgttatccacaaaattctggagaaatggaagatctattttaaatgtctgccccttgctgactctgtcttccagcaaagtggaagaactattgttttcctacacccttttgatgtggtcggttattgttatgttgggtcaaagggacttacctgggggatgacagatgcagacactctgccaccagcttccttagaagtgcacaatagcaaccaaatcaaatcactgagaggatactgggtagaaagttgcttttggggagaattctaggaaagagaagactgtgacctctgttactgcacaatgtcaaggacagatgggaagaaggtatgaatcaatatatgtcaacggcacagatggtatagccatacagtgtccacatcctgattttctatcccctgaaactgaaattaataatgccttcattataggcagtagctgccaagcagctgagagaacccagcacaactaagagcactgctctgagcaaggtgtttgaaacaggagttttcgctgtctgtctctgtctctctctctcttttagaagattaggaatgctatggatcgtgaggcaaaagggaatcatcttttgatgctgagttttacaggttcaataaaccaaagatagagcaactgtggttgcttcgtgctttgcaatatgtttgtgccagggaatctttccccaggttctggccatgtcataagggagagggttaactttgctgtgccaattattgggcttgcggtgttgaagatctcagaccagggttggaagtggagtgcaaagtaaaaataagcaaccacaaaccgccaaaacaagtattggtacatctctacaagctccggctggtaatgatgaattcagtattcatcacatggactaattaatgcacgctaacacagcccagtgcaatttgcgagtcacagattgcattaggtgatacaaatgactcatttgtgaacctgaaggatgacctttggcaggactatctgctgacctcaaaaatattaaagaaaggttatttcaccttgccattgtctccaaatgccaaaatagcccaattaaaaaccttgacttggaaccataggagcagatgcgagtcctaaagggcattaattattttcagtgtcagctggttgtataactgaggccaaatgagagtttggaaagctattaaggcagtgtattatatgcactgggtctaagatttgaattcagaataaggtgtagatttcatctatttaggcaagctgtatagaatttgtgctggctgtcctgttaaggattaagggctaacataggcgaaacgaagctcatcacccttgctgggttcttccctctgtaatcattcatctattttcctaagtctatttgcagaaccatcattagttaccatattgtgaggtcaaacgcataaacgtgtgcagcattagcttgcttccaagtggacttttctccctctctacaagtctaagcactgcaaatgatcctgtactatttccacccccaaatgtggtgacagatgaagatatgtacccaagctaggttcccatatggctaatttctacatttgttttaacaacatgcagatttttaggcaaattaaaacacagggacttccatattcatggcatcctctccagtgctgtcatcccttccaccaagtgggtttcagggagtcacgctggtgccagagcctgcactaaaaggaaaaggggcaagcatatctatgaggtgtgattgactcacaagagttcctgttaaaaaaaaatggagccaagtgcagtggctcatgcctataatcccagctacttgggaggctgagaagggaggatcatttgagcccaggagttgcaggctgcagtgagctatgattgcaccactgcactccaggctgggcaacagagcaagactgtgtttctttaaaaaaaaaaagaagaaagaaaagttcccttggcattgcctgctgcacatgcctttcaagtcactaacttttactgtggacactggccaccaaggcctgccatgtgtccagtaggtacaaagcagaggtattggagggcagggaacgacatattcttttcagcctctttagagctgaagtttcagattctggttcaccttcacatccagttgaaagggatggaaaaggtagaacaatatgataggaagtccaggggtttggggaccagacaaatctgggtttggatctcagtttggttatttagttgctgtgtaaacctgagcatgtccctaactcagcttcagcatcctcacctcaatcatgatacctgataggattgttaagaagattacattaagcatatgtgtgtatacacacacacatacacacacacacacacatatgtatataatgagcaccttttttggaatacatctttctaaatattgatgatttgtaatttctcatatatatatgttgcaagttatgtacacatatacctaaagaggtgctaggatatcatggttattgttatttttattgtggggaatttatagacagttttcagagatctgatttttttcctctagatttttctttctgtccttttgtggggctatgggcaatgcatatagcagaaaaacacagcttagaaattagagtcctgtctttaaagccctgttcagttggaaagttgcttaatcttgataaacttcagattcctatctgtaaattgggataataatatgtaccgtcgtgttttttgagaggattaaatgagataatcgatgcatatggtgcttggcatttggtaggagtttgatcaataaatgcaactttactctccttgccctcagaatattcctatcctttgtccccacatatgctgttaataagcctttagttgagagaagatgtggttctgtttcaggtttcccaggctagttccctggtgtttatttattcaaaaaaatgagcaccgttgttggaatatgtctttgctagacattgatgatttgtaacttctcattctcaaagttgaagggagatctgctttttcatttggtgtctttatgtttctctgttgttttccagcacattatttggtgacatcccatgttatagattaaaatattgcaggcatcaagattgttctcactggcctctcagatatgattggtgttatctatgagataaccctctccggggattttctcctctggctacttagaccacatgttacccaagcaacatgagtaccatgttccccctacaaggttgttattattccaaacttccatttcaaaaaaaaaaaaaatcttaatttcatcctaagaccctcataaatgccagcagctgatgaaagcaggtttgtttcttgctctttgggaggtggccacccatgtcagcactggagagtgtctgcacatcctcgcaggcccaacaagtgctaaacagatggagtgagttcagagctgaattaccaaggagaaaattctgttctttcaccaaatgtgatttttaacagccatttgcaaagaactctaggccatggaatattggaagggttggcttcatggataatgaatgccttagttgaaagcccattcaaactctgtcagcagctaatttctatatataagccctcccttaacctaaatttcaagaaagcaagcatgcatttctgaatgcatgggctgactttgtaccagaacggagcttcctattggacagtaacttgccctaattttggtatgccttgcccagcacacaggatgctgctctgagtatttggtaaataaataataacttcagtgttagtccattctctccagagatgaaccaatgtaaagtaagggtaagtgtggggagtggagagagatgggtgagaggtgggtttagttacatgagccctcagataaccttatcataaagtggcttaactatacacacagtgttccactgagggatcagtaaattattaaatctcagtttctcagtctttctgtcttagtctcaatctctttatctcttactaattctctgtctcgtaacactaatggtaatccattcttccccagtatcagttctcaagccttagctcacagagaaatcacctaagaaactagttaaaagtgcacctcattagagttgatgtcaagagtctgtttctataaagttgggtgagcctgaggattctgccttttaacagaaccctcctccccaacccaggagatgctagtataaatggcccttaagccatgttttgggagaagctagatgatgctgatggagaccaacttccttcaccataagcaaggttgcaaaatacaagaagactgaaagagtttccagtagtttgagggctttttaatcattgctagtatcagtggaattctttaaacaaaatcgccataaaattcttctttcaaatgaaatagagaaagcctgcaaataaaacctctcccaagaaaagctgccctggctgaaggagagtgaggcctagggagccctgccacttgccttctctctctcttctgtcttcaatggcctcagtgttctgggcagtgttcctagagtacacatccccctttcttcccaaagggacccacgatgaaggcctgggtccctgtgacaggaaagatgacctcatgggatatctgagttctagctccagcctttcctctttgctgcatggcctcaggaaacttatttaacttccctgaccttcagtgcatcccttgaggaaaaagagggagtttgggctagatcagtttttctggatgtcccgtcattcacagactcgctgtgacttttgctatagatgagtaccacctggaatatttactccatatttgtctttataatagaagaagtctattcactgtttcttagctaaatattcacttaggttttgagctaagcaatgctctctaaaattaaaagtttgatgtgccacttacggtttttctttcctaacacacatgaagataaatacataaccactaacaagtgtgtatacctaaaatcagtggtttgcacatgacccttgagaaacatcaagccggatggtctctaaagacctcctgctccattcagtggagctggtatccaggtaggtctgtgttgttattactttggaggtttacagatgggggtaggttatagggaaaaacaaagaaatcctccgagtgttataagcaaatgaaaggagtaaggaggacaagaattgcttgtattgctggaaagaatgagggaactggaggcttggagagtatgtacgaaggatctaaatggttcaaagacagctttcaatattaattttgtagagacatagggccaccagctgcttgattttatttaggtataataggcagcttaataactaagaacatcattggtttcttgtttgtttcttttattgagtgtcaaagagctaacagtttttattatagatctcccagggctgaagttggctagttaggacagtggcaaggcaggacactagtgaagagtgccaggaaagagccttaccctgtccttggtatatttcgaaaactgagctctaaataaatggttttcaagagacacgttgtgggaggcagaggatgctgaagtcttgcttgcggcacacattgcagaaggaaagacaatgtttatgacctgcttattgcatggaaggggagacaatggctccaaatgtatacccgctgagctggcttggacaatgcacgcagacaattctagcagtcatggtggtccagagtaaggaaataaaaaatgtaattgaaaagtgagggaaactatagcatgattaaatttggccagcattgaagcacacagttataacatggaagtcagcccagagtacatattaggttaacagctttggcttcagagatagagagacctgggttcaaatcccatctctgccacttcctggatgtgattgcttggactaggtacttaatctttctgagccttagtttattcacctactaaatggatctaatatatacttccagggccaccttaagtatttcatgacttaaagaactttgtacaatgtttggcatatagaataatatcttagtaaattgtacatgctatttttacatgatgattttatcttgttctatcaaatccaatgagataagtagtatataggtggcccgtagagatggaaaggagattgctaagactctgccattttcccagaagtgcccattgtgtgcctctgtaatgctgcattcttatgactaatattaatcttgaaagatcattacttaatgatcttgagatatccatgacagggtcacttgtcctgccacatgaatcctgactaaggtttcaaggacaagaagtctttggacagataatttccatccttggcataaaggcacttctcagtaggttcaggaggattaagaagaagtaaagaactatgtatgacctgactgcagtctactcagccaacatcagccaaatttggacccccctttgtcggtcaggaggtcacctacacttgtcaggagctacaggtgttgaaggcatgaaaaggcaagatctgtcaggacattgcgaatcagtaaaaccagacctttgctcttgagagactcccacacgtgaaggttcttaataaactttctcacctgccagaaagtgtgaaagccttgaatgtggaccccttttgatatgcctggcattgttgcattgagttttgtcatccgtttctagaaaagataaagcaagcttattttataacttcttttcttgtttttacttactatgtcttcatcttcattaacgacaacaaccaagagtgccagaattctcttgtagcactaacccccttctctgcctccttgtctccctccgtgaaaaggcaacaggcatctgtttctttaagggccacagatctccttactgtttgtgccataactaagagttgcttgtgtgtctccacggaattccccccaccccgattgctttacataaatgtccaattaatgctagttaaaagttcttgttcatgatctgtctgaagggagagacaaagaagggaagcggagatggccccgctgctgtggccatgtcctacttctgtgatgcattaccagcaacttctttccacatgtttttgcattgtttcttcttacatttatcctctgactattgtttccttttgttccagcaacagctggaaatggtaaatttgtgttttgagccaatgttttcctttgccctggcatttctaaacatttattttcctacaatccaaaagtaccagcaaagaaggcttttggaaagatcatcatcccggtggctgcccatcgccctccgaggctgtccctttaaatgaggcccccagagttcactttctgaagttcattagcttgtgttatcaataatttaggataatactccggtagagcctgagtgcctggcccgccccattttcactgtcagttttctcatagcctagcagtccagtgaacttgataagtgtcccatcatcctgttaatcaaattacttatgaactaaaattgacagttttcattaattataaaggattattctaattgcaattcaaatttattcatttagaacagacggcattcagtaatatttcaggaaatttgcatattaaatggagagggtcgtccattaagtatggtaatgtatgcatatttccttatttttaacttctaggccatatgcactgctgctacttcagcaggtgaaaaaccagaacgtgcttaatttgttcaacaaacaccggggccagagcacatcttttggcactcggtactggcatccttctacctttattccttctgcctttcctttccccacctcctaccgccccacacacagccaaaaccgtggttgatctttcgaagaaacttttttgataaacctgggcatttccccccctccttttctttttcttaaatgtaggcacagctggtaagggttgattgaaatgttttgccatagaagctgtgttcattaatttcttcaagatgctgaagtaggcattaaggttgccggctggagtccttccctgtgacatgtggaacagcaaggggcctaatagtcagccttgtaacatcaactggttacccccctcgtgcggcatgaacctttcccctccagtgaaaaatgaacctgtctgagacaaaagcacaaaccacgcatgcaatgagacagtgccattattcacacccatataggctgttttcagagatcattaaaaatcatatctccatgatattaataagcaccttccctgatccaggtctcgggtaacaggaaggtatatttagcactgcccccaccacctacctaatctgagatcatgaatctgggaggaaaaaaaatgcatgtaagatgaaggttaacaagctggtgtggtaggagccacttggctttttaaacagctggtgtgtcccagctctccctacaccaggccaagtggagaaagacagggtgtggccccaccacatcaggttgtttctgatgacttttgcctctactcctcagaaattattgatatctggtcttaatgatctgaagaaagcatctgccagctcattcatctccaaaaactcacactgaataactggttgctcatttaacctggtttcaagtagacttgtttttcattttctgcagttaaactaaagcctttgttgttttacgtacagatattttatttgcggagcatatttatttcagtctgttggtataatactcgcgctctcatggccatatgttattgattgaaaagcctccacgaactcgaattctgaataggcactgtatccttggtaggtgtccgagaggcagagatggagggcctgctccctgccttgccaaacccataccgagggccctttccactgccctccctcctcccaagcaatacataaatcacaactggtgcagagtccagttaatgcttcagttgtttacacaacctctccccaaatctcagtgggagcatgcagtacccagctttctcctttttggggtacagccatttctgctggaatcactaggatcgagaaagcagaccaccaaaggctatttctgaaaacactgatggaaaattctcagaaatcattcaagcccactgacgtgtgttaagtcaagtgaaatgtccccctgtggaacgtcttttcctccacttagttcagctttagaaccatgaagccctggtcttaatcctatttctgatgtgagttaattttcaatgcaagttttaaaaaatttaatttcactgattactttgacatgcaatagtaaagtaatataaaagaatgccacaaatgattaaagtaaaacttaacaacatacgcattttaaaaatcccagaactctatttttgttatgggaaatattaagttgcataatgtgacccagcggtacaggataattgcttaagaagctgtattgtacagatattttgtatattatatcctcatgtgcagtatttctggtgatgaattcctctgcagaaaaaggccctcttgaatggatgttgattatatcagaatgtgcaccaaaagtgatgccaggaatagaaggtggtcctggataggcaggcatcctctggaaatgttgaggacaatatctcaggaattgcctttgcggtcagcatctatactacctgcaagaataactactagaacctttttcatgtgctacatctttttttttcttgaggctgatagagagtaggaaggacaggaatacaagtgatgtataaaacatggcacagagctaatgaggtggaattaggcatagtggagggaactaacctctctgagccccatttattatatctgcaaagtggagctaacatttgccctatcttcttcatggagttgttgtgaagatcctctgagacccatctgttttccaaattctcctgttcgtcagaatcgcctgagagtagttaaaatacacatctccaggcccttgtaccaagggattctagttcagtaggcctggggtgaggcttgagaatctgtattcttaaatattctcaggtgatttttatgatccagcaaatttagaagggacgggtacaccgtatgttaagtgctctccaagatacagtactcttaggaattaagaggcttgcacaagaagtaattagaaagtagttcaagactgcacctatgcatatcactccattttaaattgggcaaagctctggattataggaattctaagcatccactacattctggaacttgaactttggtgggtaagtccctgggatccgtaggtgaaactaatggctatgtgaaatttgcaatgtttgtgcagaaatgggaatctttgtgtccaccaggaggatccatgaggaagggcccttactctcctaagacatgtgcagcccacactacttagatgagccctgagtcaatagcaggtgcttatcaaccaaatatctaggtcattctgtgaatgttctttatagttaaatagactctggaggtgaaactgtcattactcacccactaaagaaatgaacttggagaaatggaagagagagcagtttcttgtctgtgaaagcacatggaaatggtgatagagatcaggtatggctgtatttatgaatcattattgatgcagaaccacttcataccatgtcagagaagaataaattggataacaatgggatgacagcatcatctaatctaatgttagtgtgacttaatagttacattttagctgccaagtagggcatgtggagtgggtgctgagattctcagctcacagtggttctagccaaggatcataacaggagtggtgggtatactctcctactcaaggaatcccattccagggcaaggtgaaatggggtgagtaaggcttttaagagatgatgattattatgttatgatttgttcctactgtatgctgtcgtagcagaaaatgccctgttgtctgtttgcagtggtaatggattatagcttggctttagatgagatggaaaagaaaaatgggtcttcatttcttcccctctccaccctgaggatgatagatgattaaaaacaaaacaaaactaaaaaaaaacccctctatcctcatgagacattttttgttaattgtctctttgtagctagtgtagctagctgtaaccagccaggctggttagtgatagaagtaaacagtcatgtctctgacctctgagggctgacagctgtagttagtgatactgagttagtcataaagctcacagaggtaaatgagcaagccttgaatgttgaaagagtacgctgaagaaggtctaagcattttgtacaaaatgggtgttacatttagttttagtattcagcgatttcatgaaaggaaggagatttgcagaggttccctgttcagataggcgactcgttgagggaagttttctagtagctgctgcaatttcagaagtgtgttccatgactgaagagatagaaaggagactatggtacatggggaaggaaattctctctgctgggctctcggtactctcccctgactgccttgctcccctgcaaggcatacacacactgctttaaaatataggggatttatttttcttgtgaatgtgaaacactgaatcagcaggtgctaattggaaatagagttttgtggactactcaaggacagcagtgtttccctttggggccacaaactggactttataatttcctattgaatcactgcaacaggcttcagccagcctttgtttaaggggtgtcctaatactttccaagatcctgcaccaattattgtgtacatctggagaagacagggctcacaatctccaggtttttccataaaccataaaacctatttgttctgagaaatacttaaagattggggaaaaaattactaggtatttctgagattagtctgagggcatacatcaattaattttttattgagcaaagaaaatcacatctacataaaatatgtagtttaaaaaaatcatctttgctacagagattcaacatactggttctttagtataggatctaatttcaccaaagtaattgaatctcacagttctctgaaacattttcaaagatagaggtgtgtttaggatttaatggtgacccaccttcttcagcatatccatatgctggtttacttccacgaatttctaagtaccattaatggaaattgaatgtgcctttctctaagggaaatattaacagaaagttatgcttttgtgagaagggcattttaataatttgattctggtaccatctttttcatccttggaagaaccacagcttggtgggtggccaccctgtttctgataggaacagtgagtttccattttacagattgggacactgaggaccagaggacaaataaatcatttttggctagcattggagtcagtaacaaaaatgtcagacaaattccatagctcaatgaggatgacaatgtctcttcatttcaaatgtatgcagttgggaaattaggaaataatacatctgattgtattaaaaatgctaaaatctgctcttctagttccagctctgttctttcccctgcattttttttttttttttttttttttttttttatagacagagtctcgttctgtcaccaggctggagtgcagtggtgcaatctcggctcactgcaacctctgcttccctggttcaacctctgcctccctggttcgagtgattctcctgcctcagcctcctgaatagctgggattaaaggcctgtgccaccacgtccagctaatttttgtatgtttagtagagacagggttttactatgttggccaggatggtctcgatctcctgaccttgtgatcctcccgcctcggcctcccaaagtgctgggattacaggtgtcagccaccgcacccggcctcccctccttcttgacctgatctgtaactgtaagaactctcataatggccagtgcccctgtcttggagagtgttctgttagaagaggggtaaattcttcctgagccaaccaatgatcagtcatgcctggcagcatgagttttgattccccttaattaagtatgtataacttcaaatgatcctaatggtgacacaattatctggtcctctttaatatgcgaccagggttcttggtcctctagttaacatgggttatttttaaacataagcccttattgtttggcatttgtttctgtgtcttctaaaccaaaccaaaccaaaccagccaaacagaacccctctccaaaaaacccccaccaaaatccaaacagacaaaccaacaaaaaccaccagcaccaccatcctaacctgagtatatgttgccgttccaccagagaaggaatgcaaacactcagtgcagtttgtaacaccttcgtgcatttcacatctcacatttctgttctttctttctttttctttctgttttcttttttttttttctgctgcccatgagtttcattttcccatgtgccgttatattaatgtttttccctgctggcttcccagcccgggggtcacagcttgtgtttcacaacacaagacacccaaccataaatctcctttaaataatacagacggcaggaggggcactgttgagagccagtcggtctgaacaaagtggcattgatgcatggcaagcggagcagcttgaccacagcccggctggacaggtagagtgtggagcagcctttattcaaggggaggaaggcatgtgctctgcatggctccaaagagccaacccgtcctggttctcagtatgagttggctgccaatcaccgaggtttccagagaataatcacgccacctcttcctggctccagttggaacacccaattaacataatttgtgtttggaggtgcaaacgcatctcctccattataaatctacatttcttgaggcctcttggccatatttaaaatgaggttgggaactgtcagggtggaagtaacaatacacacttgatcagaatacatgatgcattgtgacgaggctgtttccttattctaaaacctagagtggttaatttaaggggcctggaaaaaaagcttgattggagttaatgggagccttgcttgcaaaggagcttgctaagatgggaaaggaaaaagatgagggtttacctagggatttgttagcacaaacaaaaattataacaacttattgacacccctcagccaagatatcatgttaagttaatttatctgtggcaataccttttgtgaacaaagatatgtgcaaatctatgtagacatacatagagatgatgtggacaaggtatacaaagatatttagtttgtgcacaaagataaaaaatgcatgtatgggtgtgtacaccctccccaacagtttgggaaataattgtcaagcacagcaggtactgtgtattttaagtaaagatgaggatatagtgagaggagccacaaagtttctttcgactgacaagtcttttcaggatttatgccttgctcatcagttgccaaactccagctcagtaatttttgtctgccaaaactcggtggtggggtgttggggagaagattagcatctcatttggttaattttttttggactcctttttctacagctattagttacacttctgaaaagtcaacacagcttctaatttctcgattacttaactcattgtagtggtgtcgggagcagttttcattgaagtgatttctagaagctactgcatacttgataaatgcgctgagaacaaaagagagaacactaatgcagggaatgattgtgctggttttggttggttacacctttgagcatttgttttttttttatattgttgacattaattgctactgtaatgtaataattgcttcaaagatacatgttttgggtggtgatagtagtgaaagaggagaactgattctgttcttattcatttaaaataacaaatgaaactgataactcaggaattcatttcatgggaccaggacacccatgagaataggaaggttttggtaacatattaacatcccaaactgaaagttttgcttttccagcttaacgtggttttatatggggcatctcagtgatgagttaatgtgttatagaattaccctagatgttaattgggtatctagcaatatgctaagatacacacctattttctcagatttgcaagccatgggtgtaattttggccttatcttttttccacctcatccataaatgtaggttttcaattatttgaaaaaactttgtttctgattttatttgttttggtggctttttagagctaagaacaccatactaatgccaccctgtgagtatgtggtattgctgtgcacaatacttccctccttgtcaccttcgctccactgtttttctgtctgggtccccattagagtgactgctgcgtgaaggcagagatgatgtctgtttcagaaactatcatactcccagtatctagccataattacttttagtctgaccaacttccctgatttgcctggggactttcctggttttagaactgagttccaaccccaggatgtcccccagtcctagactatctgggcacataggtgctcatcaatattttctgagtaaatgaacccctcttcgtaaggaggttacagagttatgtgggacaaaagtgaactcaacttctatttgaaattagtcagcatcatatatgtacatcttatctccctggtcaacaataaaggatgtgagagcagggactgtgtctcctccatttctttgaatttttcacagtgcgctagtaaacatttcaagatagaattcaatcaagagctaaatgcaatagaaccaaagagcaaattgttctgtggtataaacccagactctactccttcctggctctgtgaggttgggcaagttactcaatatctctgtcatctttttccattatcatcatgtgtaaaatgggaataataatagtacctgcctcacagaggtggtgtcaaaattcagtaagaccaagtacagagcacagcctctgcttcgtggtgagtatgagacgtgtgtaagctattcctcctcctcccctgcacctgcctgttccttctccacacataataaacactgagcatgttcaggtaagtgacagcacctttttgttgttacatctcattaaactgaattttgagttgtttttgtatagaatggtttgcctggaaaaaggatgctttttttgtatgtatgattggttccgaaatgtctcattcattttacctggagtctctttgcttttttttttttttttttctgcattgccagggtaaggaaagacaggcagcctacttccaagcaagtgatctgttataggtgggatagtgaaactgtcacttacaacattcttgtagagaatgaacacaagacaacactcatactggcaaagagagaagctttgaggggaggtgtgtgatatattgagtctacctttatccctctttccctatcgaaccaccttcccctcatggtaaagctgggacctaggtatattggtggcaacatttctctgctgctgacctcaaagagactaaaagcatacgtgattgaaatgaaaaataaatgagcagctatttataaataactcctgttaacgaaggcatgtgtttcatggaaataatctcatacaaatgactgctttattttgctccctcctccattcccttgtatccctcctgctacccactaagtggggccagggcaaggctttccttacaggtcccctattttcttaatttttctggtggcaagcagcagaacagagtggtgtcactgggttgcctttagaactttagtcattaaatctcctttgccccagcttcggtgatgcatatttcaataatgagcaagaaaaaatggtttatggtagtttaataaaagcagaagacaaatgttgctcctgtgcaaaggaactgaattacatacttcatgaaccaaattagtaccaaaacatttggctttgttcgaaaggtaatatgcatttatgggcccatttttcagtaagataaatatgacacacgccaagatttccctgaagtaaatactgtaaataataaaagactctgccaaggaaagctgagaaatgacttaatcctcatccagtgctatcgcaatgccaaaatgccactgtccagacttgagaacaaactgcctctttaataaactcatctcatgatcaagagagtgcaaggccctttaatttcccaataatggtcaatattcctcaattccggcttaaaaaaaatacattcacataggagctagggcattttatggcataagcaaatttgattaccaagtaacaaaatacattttgaggatggttgggagttacacggcagcaatgtttatgtgaataggtgcaaatgggggaggtttttgcagaaagttaaagctatcactcttagcctaactctataatcctcatttcgcttgagcttattccagttaaagttttctgctagcaaaatgtgctgaatgtatttcttccctgggtgcagatttgcctgtgagaagctgggatgataaacagaatgctgtgagatgtgaataatatgagaattcacagtgccagcaagtgccttctttaaagtcattcagctggctctagaagatgttacaacacacttcttgtagtagggcacattgttgtcttaatgctggagaataacaaattgaaatgccacctgagcaggcagtaatataaatgaaccgaggaggtgagatttgagaaatgtattagggagtggtggggactggggcagaccggcgagcatgtgccttgtataaaggggaagtcaccaatataccaggtcccagctttaccataagaggaaggcggttctgtagggagagaggggtaaaggtagactcagtgggcctttagaaatgggcccataaatggatattacctttcgaaaaaagtcaaattcagttcctttctaatttcggttcccaactaatagctgctatgcaggaatgtggacctagtattgctggatgttttattttcacaaaatgtgggatatcttgatgtttcagtgaatgctcccaattagtaaatgctgacaataaaaccagaaaggctctgtatcccaaataaaacaaaggtcatgggcttagagtttgtgaattgtgctttgaagttttgggcttgcaacacaagaaaacaagtaggctgtaatgaatggcatttagtcctgaggcagaggcaaaggtggcagcacacgtggctgggaacttgctgtctgctgggatctgtcctaagctccaggtgcatcaactcattggatcttcaggtccccctctcaagcaggcactgtgagtaggtactatttcttctctgttttatagatgtggaaattgaggctccagaaggcacaggcagaatttgaactcagattggctctgtgagctctgaggcaccactcaagcattccttccccttgctttggtggtgtggcaccacaggaagtaatgtgaattggagtcagggccttgggtttggttttgcagctccccactccttcttgtcttttaccctgagcctctacttcttgctggatcaagtgttttgtaccctccaccccctagattaccgggtcttttactctgagcctctacttctccttgtatcaagtggacatgatagtacctgcccactttacctcacggggtggggaaggattacctcaggaatataagcagaagagtgtggaaaattgtaaagtgctctgtcaacacaaggagaaggaatattgctcataattagagaatacagagaggtgagatagtaaagccactgattgtctttggatcaaatacaattaaatagcaatcccttcttgactcttcaactcaataaagtgtctatttgtagaagtggctaaaactgaattcactttgaaaattaatcagccaccaccaatggctggattagcagactgcgttttttttttaagtgaaaaagaacatagcagataaagaaatctaccttccaaacagaagttaacagcctaagacctgcccattgtctgccaggctcttgacaggaggacagagcatgagggcaccccactgctggtgccttctgtaacccctaatcaagggacttcccttaggagaagccagagagaagagaggggccattgctgacctgatttggaactattaattgaagttggctgataagggcacgttcctgacccagacacggtgagcatttgaagagaaaaagaaaaaaaggggcatgcagaaaacatttatggaaaataccccaagaatgatgcagaaagctgtttatgcatgtaggcagtgagtaatcttcttatttataaatgaatgagctgacccggggaaggggagctttgtggattataatcacaatccaatgcgacaggcttcttcgctgaagagctctcccctcattgacagccaaagccttgcagaatttttccccctttatactggagtctcaacctaatggcagtgctaatttgtcctccaaagtttcgtgaactgaaggtcttagttattttagtttacaagatctactttaaggaaaatcttttgtgcctgctagatgttgttcttaactttccagctttcccttctccactttccccagagccgtcctttggctctacccagcaaagtctctaaccgcacctgtcaaagaacctttcctgtctctgggcttggattggacacccccagttagaacccttgcctgctcttttctatccacagctttgtgtccttggccaccatgctgaaatctgttgtccccatacgagaagccttttgggctgggctctgtggctcacacctgtaatctcagcactttgagaggctgatatgggaggatcccttgagaccaggagtttggaccagcttgggcaacatagagagaccttgtctctaataataataataataatgataataataataataataataataaaattattcaggtgtggtggtgcatgcctgtagtcctagatacttgggaggctgaggcaggaagattgcttgatccctgagttcaaggctgcagtgagctatgattgcaccactgcaactgcattgcagcctgggacacagagcaagatcctatttctagaagaaaaaaaaaaaaaagaaaaagaagcaggcttttgggcctaatcgtactttgatcatgccatgaatcaagtcagcttgtgacttgggcatggagtttcatcaatactcttgctcagtaattgataggtaattattttgagggtggagttttgattgcattgtgtggttgtgtctctacagcctcatgggagacattgttattagcttcctaagaatttcctctccttctcgacagcagtaaaaaaatacataaacaagcacttcttactctcagtagatgggaagcagtatactgtcaagttaggagcatcagaaaacttctgttttgtttttttgttttttgagatggagtcttgctctgtcgtgcccaggctggagtgcagtgttgcaatcttggctcactgcaacctccgcccccctggttcaagtgattctcctgcctcagcctcctgagtagctgagactacaggtgcatgccaccaaacccagctaatttttgtatttttagtagagacagggttgtaccatgttggtcaggctggtctcgaacccctggcctcaagtgatccacctgccttggcttcccaaagtgctggtattacaggcgtgagccaccacaccaggccgaaaacttggttttgagtcttctcttcactactcactctctgtgtaaaccgggggaagttactgcattctctatacctcccttttcatatctctaaaaagggggttaaaagaatacctacttcatataactaacatatgcctagcatataccccaaatatttcttggtaagctcttaataaatgttagctataattattattatggaaaatgcttgttgactaactgaacttatcgccaaatacttttgctgttgcaaaatagtgctcacatagtgttggatgttgaatgaagaatgaaaaaaatgattgaatgagggaatgaatgaaccagaaggcacagatatattcattcatttattgttgactacccattgagtggcagctgaggatgtagccaagaacaagacaaacactatccctgctgtcatggacttcaagcccagagaaggcagacaaataataggaaaattaaataaataattaaggcaatttttcagacagcaagctttagcggtgcttggtgaacatgaggacaattacagagaactaatggtatttatcctactgtcaacccaatggagaaagtaggttcaaatgtctgataagatgtatgagagagagaaagaattgttctatgttattccaaagagcaagaataacatccatgtggtagaagttaacaaggaagatgattttaactctggctaatgaagatacttctggctcaatagtccaggagtagactgactgccttgagggcagtgagttcattatcaaaagaagagcataaacagaatctgagggacattcttgagtaatatgtaaggttgctttggataatctctaaggttttttgtagagtaaagattctaggatttgctgttctccaattgactaatgaagagatctcttaggctttgggataagagagaccacgtttcaagtctaattattaatactatctgcgggaccttacttatttccactttactttcctcttctgtagaatgggtagacttatttggaatgcggtaaggattacattaactgaggcttgtaaagtacctagtgtaacgcctggtgcccaataaatggcagttgctgttgcagttgatatttttatgatcattgttattagcatcaaaatttgggaatagctgtcttagttctctgcttcaggggatcctccctgctgaggcagtgactagggagcaagtcaaggaagtagttaggggtcagtgggaaacaggtggtagctgccttgttgaaaaaaacagagttgtacaaatgctatcaatttccgggcctcatgcccatgtcgttaccaaatcagaactgcctagagagaaagagccctcctccatctccgatgacagttcttttatcatttttccctcttctgagctacctttagtgttaatcaaaatttgatttcattaggaaggaaaaagtagtaaaaagtgatagaggagtggagacacagtataatttgttttgcaccctccactcccctctcccaccgcccaggtctccagggagatggccttgaagatacattcacatatgcctcttggatccaggcatctttgtaaaatataaccccagagggaaaaacacaagaacatcttcttagataagaacgtgccaattcttctggttcaaaatgtcttcacgtgaaaaatttcctgcagcggtaggaggaagctcacacacaggacaagcatgagacacatctggagggagcccaagccgggaacccgagggcctgaccatctgccagagggccagatgctgctgctggaagcctcttgcctcccagcttgtcatctgggttcgatgatgccatccaaaagagggccacagagtgggagggcgatgagcaatccatcttctcccacccacggttcttaattgtgtgatgtagggggtggtaggaagagaagagggttaaaaagtttgcccacaaaaccgcacctttctcatggaaatggccatcctaaaacacatggctctgaccacccagaacttttagaatattccattcaatatctcttcattttccttcggtctaaatagaatggatgaagaggcttggctgtgtagttgtcagtgggagctgccatcttctgtcaacttgggagtgtattaagagtttctaaccaattgcattggtcgttacattataggatttcctatattgcaagtgttcttcccgttaacagctttggtgtctgattttggccaaagcagatcattgggattcagagggacatcctcttctttttccattgcagaaacaatcaagagtctgtgcacacggcactcataaaaggaaaatgatcaaaaccacacacacaaaaagactattaaattccagatgagattactgcttcctgtgattcccaccattcgggaatgcctttctgcttcgtgattgcccactgacagacttacacaagcaagatgtaaacatagtaggattatctcttacactatcacatatgttttatgctaaatcattagacatctaggatggttttagccatggcctgttttcagtgccagtggtggtatatttttgtactagtgtacgtgctttaactcacaagtaattgcaatattttctaggcatatgcaaggcagaaactgttttattttaaaatggcacctgttggaatagtttaatatgtaattttcattttcacgtaattattcagatacattattgaataacttacgcatcttgtattcaacaatatggggaacagtatactgtgtgtctacagtcttgggctgctgatagttcctctgcattcattagaggaatgactggggcatcttgggctgaaaccttgttatcgctgctctttgtaagcaggttgtgttgtcactgtagggagggagggctgttttaagcttcgttcccacatttctttttgcagggctggtaggaccaccacctcaggcagtctttcactgccctgtaacgtggatccttcctaaatcttcactgttggattgtgtggcaacttctgcctattagagttgcatctgcaataaaaaagcgaggttcctgagagacaaaaaagataatcccccgcttagtgcgtggatgacagccacactgagtgcagtactaccagtggaaagtctgaggttttgaaaatagcagaagtgaaggaaatgaaaatgtgatgtgaatttatacccaacaattgttttctatatttctcaggctaacaaatgtcccagttagaaaaacctctggtactgggtagtttggaaaaataaaagttgcattgcaaaaataaaaagaaagatcccattctaaggttagagcaaatgtttgaaggtggatagaacttccgattctggttggtggtttattacatatgcttcagggacttgggcacatttgactacaatgagtaatttctgagaaaggatagtgagggagaagaacttttctgtcagcgtcagaaattcttaagtctgatgtcaaatgattagtaatgatgtggaacagttgccaatgcaaatattggtaaaaggagagcacctggagatatcaaaaaagaccaggggctattcagacccaagatagatgtctctggtcttcagtagctaagtatatatactataataacagtgctgcttttgatatttaaaaaaaatgttttaaagacaaagggtaaacttaaaagtcatggttcttaaatagcaagagattagggtcttctggggaacaaaactccaacaaaagattcccttttacacagttttagaatcagcaatgatctttcaatggcaaatagtgatggccagcatttgttgagccctctagatgcctcgcccagtaccctttgtgcattgtctcatttcctcctcacagcagtccagtggaggtagtattaatatccccattttccactgtcaaagctcacaccactcttcactgttggagacaagacataattctccatttccaaactaatcatcttataaaaggaagaaaaagtgacttcaccaaaacagctgtgggggcagtggcacaacttgaacttgaagctaagtcttgtggctctttttgccattggatggtggcttctatgaaattctgttgcttgtggttaattagtatcatcaacttgcacagttcatttcttagtcacatatgcatgttaactgtccctttcaactagatgagagcaagaatgatttttttttttaacgtttaagttcagggccacatgtgcaggatgtgcaggtttgttatataggtaaacgtgtgtcatgggggtttgttgtacagattatttcatcatccaggtattaagcctagtacccattagttatttttcctcatcctctccctcctccaaccctccaccctctagaaggccctagtgtgtgttgtttccctctatgtgtccatgtgttctcatcatttagcttccacttgtaagtgagaacatgcagtatttggttttctgttttgtgttagtttgctaaggataatggcctccagctccatccatgtcccgcaaaggacatgatctctttctttttatagctgcatagtattccatggtgtgtatgtaccacattttctttatccagtctatcactgatgggcatttgggttgattccatgtctttgttattgtgaatagtgctgcatgaacatacacgttcatatatgtctttataatagaatgagagcaagaatgatttcagttgccctgcagtaatactaagggtctaatagacccttaacaaatatgaactggctgtcaaaatgcctctgtgttcggtgtgtcttgggctgaaatcaagggacccaaattctacctccattactatttagctataagaactgggcacatctctgaaactctgtttgtgccactgggataggataggtgggtgggcaggggtaggggcaaccagtttttttttctgatcttccaaggagagaaatgaaatatcaaaagtggaaattctttgggtatttattttacaagaggttttaaagagctattggagtcatttggcctacagagacaattttaatggagtaatgaaagaagatggtgagatcctggagaataaagcaaccacccacgtgactttatcctatgtgtgtaaatatgcacaacacatatgtacaacatcagagaaacaagaactttgaaatcatacaatttgagtcccagcctttgccacttagctgtgtggtcttgagcaagttacttaagctttgatttttttcatcaggaagttgtgggtaataatattcccctaaaacaagattaaattagagaattatgaaaaacagtcagcatgtagtacattacaggtcttcagaaatggtagcgattactattattgaatgaaccatttattgagtgtttaatctttcagaaacgtgtataaaggagatacaagaaaagaaatgggcaaagcttgtgccctctggagattacaatttaataggtaatagttgaggaaaaaaaactcaacttcccatcaatatagcaaatcttattcaacagtggataattaaatggaaattctgtgatccgttctccacatcgaatggtaccgtattccttgaaagctctttatcctcaagtgattaaggaatattttattttgattgaaagtgatttgaaacttgccttctgtgaagggttaacaatccatattattatttctttcttttattgactttgtagctaaagaacctttccttgttcaacctgactttgcctttaatttttctcttccttgttatctgttgtatacagtaattgggaattcctttcctttccatcttttaaccactcctcttctttgcctctctctttgtgctgaatcaagaatgcatttcaggagaagaaatgtttgtatatgtcaatagttccaaaagtatgatttggctgatctcaggagttttatttttagaacttggaagttgagttgcatttcagcagctggttggaaaacaagcttcagatatgtttacaggctgggagcagtttccacttctgcctcaagggatcactggttaggtagttcaggctaccaggcttcagaatctcctttggccaggtcactcctcctgatctgaattgcttaccattctcctctcaggaagtatttggtttattgatggtgtcccagtagaatgatagcattgtctttagtcactgacctgggcagggcagatgactttccttctttctggcccagcctcttgtctgtagattatgcataatatttggcatcgattattgtgaccattaaatgagataatacatgtagaatgcttaggacgtatagtaagtactctgtaaatgtccactgatattagtattaactttattttcatcacgatttttattatagaatagccaaacaaatattatcgttacaattttattttgagacagggcctcgctatgttgccaggctggcttcaaattcctaggctcaagcaatccatctgctgttgaacctggctaaatgttatttttttactgcgtttttattctttttcaaagtgctgtactgagtactctgtgcataatgaatgctcaatgaatagtgctggtgtccaacatttcctacctggcatctgacttattattgatgttcatagtcctacaagggaaaatgatcatctgttctcctcagctggtaaataaatttggacaatggtaaataaatttggacaagattcttatagactgaaattgattttggcattcattataatctttgtcctatttaatgttcatatttatatatttcactgatgggttgttacataatatacagtatatatagtatatgtaacattaactttctaaaatctaaagggttctgcattctgaaacatacctggcttcttaaaggaaaccagataagggactgttggcttagagatgtgggcgaattgatactttataaagcttttctgtgcactggcccatctgattgttgtaaaagcccattgaaatcagcagggcaagcatgagtcccattttacagataaggaaatggaaacacagggacgttggattacctgtccaggtgacacagtaaatggccaagttcctatatttcttctgccacacttcctgctcttctctgtgatgttgaaagagcaactaatcttgcctgtaaaacaacgaggaggtgatatctggtttgagttttgaaggatgggtcactctacatgccgcaagtaattgggacctttttagcatcatggaaactaatctgccacttgatggaacttaacccagggtagtttcaggagtatgagtaaaaaagggggagaaaaataaacctgaaaaggataaagacatatttaggcattaaaagattttactttttatttatctgccttctattttttattttctcatgtttgtgcatagagaggatttttaagaaccaaagaaaaaaaattcaatggcctcttccctaactcaagcttgaaaaaagatccaaaatagatttgattcaaagaataatattgtcccattattaaattttggtatcagaaatgcatagagaaatttaatgattatttcatgatgcaatcaatactctgtggactctgccatgtttgctgggaacttggaagtgacattttaaaggatatgttaattttttattttagtgacctttttttccttcattcatttgcaggagttttagtatttgggccagaactgcttaaaacatattttaaataaagcttctcaacctcacttccctccttttttaatgatgtaatctttgatcattttaaatgttttaacagagctctttaaagaacaccaaatctttgtaagatttctcagataacattgtcctacacctggaacacaagaaccattttgaaactgtaatttggtccccgaagagcccttcagcctcttccctgcttgcttgccctgactggactgtctagaaagaaagctgaagataaatggggctggatttatgcagagtaacttaaagtctcctgcctcttcttgtctgtcttgtggagaatatacttggaaatgtgttttaagtttgaagcatcccttgaacacctattttgtgattttgttttcttcctttctcttcgtggaacctttattagaagactgacgagccttggcctcagcaaaggattaagtgagcagattcttcatgtaataaatctaaagacatattaaaagcaaggaaaagggatttcccctgtgttttggggggatttataagtgccaaaggctaaacaacttacaagagaagtaagattgcccctttttctaacctggacatgttctaatattgtgacatagcgtagaattaagctggcttactaagtagaaacatgtaacataattgaaaatgcacaatacagagaggaattctcgatacagcaatgtcctgttgtgaagattacactgatttataaggaatgccttaactcctaatcccagccatgcaagactacagagtcaagttgagtattttataaccaggggaagagaaaaaaggcttaataatatatattcccaaaattgaatataaatttggaactgatggttgagcaagccattcatttctcttaaaacaatgtaacaatgaaaacatttttattacattttgacatgtggattttcaaagaagttcaggcattctctatttcagaaatgatgggtatagccaaatcagagagtgagtaatggaaatgaatggtgtgtgagggagaaggataaatattgtgggacataaactgtttagaaaagatcagcaaagaagaaacgtgtcaggctagcagaaatgaagccaaaggaataaccttatgtataaagtaagggttagaaaaaaaatcaaagtaaaaggggcgcttcgagtaggtgctgagtgagcaaaatcattatggcttgaaattaaaaataataaaaaataagaatagaaattgagtgcaccacttctttctttttttgtaaaatgtcttaccaggaaaagtcatatcatgaggtctgctcaggatggagaattttaagagcttgtttatgcatcaaagatatcatggggattgtacccatgtctaagttcaaaatatattttatgtatatatgtcttaaacttatagcctaaaggcaattttatacaatatattagataattttgtgcatgaaacgaagttttgactgcgaccccatcgcatgaggccaggagtggaattttccacttgtgtcatgttggcacttaagctcatattttggagcattttggatttgagatctttggttttttttgtttcgtcatccaggatggaatgcagtagcacaatcttggctccctgaagcctccgcctcccgggttcaagcaattctcctccctcagcttcccgagtagctggggttacaggtgtgcaccaccacaaccggctagtttttgtatttttagtagagatggagtttcaccatgttggttaggctggtctcaaactcctgatctcaagtgatccgcctgcctcagcctcctaaagtgatgggattacaggcataagccactgtgcctggcctcagatttttggattagggatgcttaacctgtatataacggtggaagagtaaaatattgttgaatagaatattaaacttaggaaggactataaatatgtgtgtgtatgtgtatgtgtgtgtgtgtgcatataggaataaaatgaagggaaatatctttggaagatagtattccctggtatgttacacaatcacagcaattgtggatgaaatccataaaggctatgttgactgtgcatatagaacaaggggagctcttaggtgaatggtaactcattggcaaaaataaataaataaataaatattttttaaaaataaagacaatattgagctttgcatcatttgtttgtcagtgagaccagaagaataaaaactgaaataccaaaagaaatttctagttcataggaactggaaaactatagagtaagagagagttgaacattcaaaaccttgccaaggagacttaactgagccaagaaatggctaaatattgtgtgtgtctacagcacacacatacgtatgcgtaaacatacctatgtaatttacaatttacacacatatatacacatagacatacacacacacacatatatatgcatatacactagctggctctaagaaggaaaattaccagagaaataaagattagcccaaagttgagacctgggaaagtgatggctctggaaatggccagactttagcactgggtctacttcgaatccaaaggaaataacaggggagagatgctggagagatttattttttgcttgcagggaagtgggcattaggggaaaaatacacatatatatcaataaaaagggaagaggattttgttaccataagagaaggatgagcttcttcctacagttacagggacacagttcccactgaaatcaattttcgttgctcagagaccactgcacttagttttctaactgcagaagttggctacatacagaaatgatgtcttgaagccaaaagaaggcagtggcaagagagagacatagggttttaaaaatgccaacctctcaaatcagaaagcattgttgtgctcaaactaaaacaaacaaacacacacaaaactaaattatgtaccgtgggaaatcgtgaacttcaatacctcctcacttcaggataacctgtgattcttttgtggaagacagagtaacataccagtttcacttgtggattaacttcctgagtggacagaaaatctgtcttatgctcaacagtcaagttgttttatttatctttgatgtttcaggcaaggggaagaaaacaaatagtttccataataaggtagacactagcccaggatgcagtaaagcatttcctgaggacttggctaaaaggaggtagaactaataccatcaaagctgattgagttttattttaaaatgttaaatagaaaacctacactttcaaaagtgatccattcccaagtaaagggaaaatgacatcatctcaacttcagtatataaaactcttgtatatttgataccaggcttagcagcagggtggcgggggcttcggggaaggaccaaaaacaaaggcagcagacaaaatgaaaagtataaatagaagtattgaatatacagtaacctggaggaaattactctaatgctgctctcagttcttgtctccatttgtaacaatgagaaagaaatgactgaggtatgtaagataatgctataggagtcccatggttcagacaggaaaaaggtctgtgtctttagaaaagaaaattaaaagattaatggagctcgttgagaagtttgcatggttctgagaggcatgtagaagtggctggtggctatttgttttggaattaaatatatgaggataagggctgttaaatgaataagcaaatgcggatcatctttgacattctttgtaggaaagcataattaccacattgaataaaggcctagtggccagacagcaggaattaaacatttttaaaaaattaagtaagtgtaacatttagggaaaaaactcttaaaatatccctgtgtgacagttttagctttgcacaatttttttatatctagcatatatattttcattttacgcattctcacaacaacctaggggattagacaggaggatattattatagttgtccttccgtatctgtgggggattggatccagcatgcccccttggataacaaaatctgcagatgctcaaatcctttatataaaatgtcataatatttgcatataacctaggcatattctcccgtatactttaatctctatattacttaaaatacccaaatcaatgtaaatgctatgtgaattgttgccatactgtatttttaaacatttattttattttcgtatcattgtttattgtttgaatatctttgatttgtggttggttgaatctgtggatgtgaaaccccatagataaggaggaccaactgcagaagaggagtagagaagacctagatgttggctttgactctgctggtagctcattccatgacttcacacatattcccttaatccctctgggtctaatctgtaaaatggaacatctgagcaaataatttgtgaagcttttctgctctagattctagaaacctttagttgtccagtttcactaatgaattagggataacagaggctagaatcccattctcgtagctcagcatcataaataacttagatgtacttattctcaagctttctgctcagctttgccatcattgaggtttttttccttaatttttcctgtatataacattaagcagtagaggaattgctaggacttgtacaaatttatttttaaaattttaacctcaagaaacctaagtagaatgacaaagtggatcctttagctgctccaactgaaaagctggctaaatactgtcctcagcagaattttccagggtccttcttgccatatcccacttgcaagtactgtctccccatcctcaccacttgccatccccatctattgatttagatgtggtttattccacaagtacttgttgaatgcttaccataggccaggcatacagtattaggtgtttaaattagcattatagaatcctggccactttctaaatggtggagtttgaagttgtgggaaatcagggtagttttggtagtgttacaagtgttacaagtctttctcagtggggaacatatgtggggaaaaaaccctaaagtaatcagtgggaacttaatacctaaatacatggatgggatgggagcaggaaaggaagagaattattcaacatattggtgggagaagtaaagggaagaaaattctgcttgtgttgattgggagaggacacatctatgacagggaagatagcaggaggaaaatctggtgggaagatgaagaggaagaaggaggaagagaaccctaggttaatagatggagatggtggtgagtgttcctggagtggcagaggctggaggagaattgcattatgggagggatgatagggcagtagtggagatatgaaggagtaaattcatatcgagacacaaattaaacctttttggttattgtttttcccactgcagacttctcctctattcaaaatgtatcagtaccagttccatggtctttaatataatttgtcaatttttactgggatctggtggaggtatttattttaaattgaaaagatatagtcatagaaaatgttttcttgacaactcactgaacaaatttagcacattggctgtgaaagctttctgtagctatgtagatttattacttttatgactctatactaggttcacattcttgcctcttaggaatgaatgtacacaactttctctgagaacaatttggcccagttacattttattagccataatacatgctagccatagtcagtattctttctggtattttgatattaagtcagacattgattccacaatatacacacaacaaacacacacacacgcacgcacacacacacacacgaataaaaaatgaggagtgaattttaagaggctctttcatttcttcaccaactaggaaaaacggaaaaagaacttagtggtggtaactgtcaatatatgttgccttttgtggcgtctctttcctaatcaaataaataatttgtaaggttttgatgagaaaaggatgtgacttctgccgagccctcacctgccagctttactccaagcagactgatttagaggtttaagcagagaaacagtcctttctcctgtttgccctggaaacagagagccccatggtgaggttaatcatttgaattttgcaattcatattgaggcaaaacagaaatcattcttcaccttaaaccctggaaatgtgttggcaaacttttcagagctcaaggtaaggcttttccccccactctttgaatcataaacatgaatgctttaaatatattttttcataacccagtctcccactgaagtgaatcttactgggcaatagaaaatggagtagaaatcacttctagaatactgggttaaagtgaaaataaatagaggagtataaaagacgcttccaatcacagagaagcttgttgaggatgcaggtggaacctgaccgtgaaggttgtcattcacaatggtaccttgcccatatgcttttcttaagaattgtctggcaaaatgtatacattttatttaatagtatgtattattaatatttattaaatatgaaatttagttaaaactgcttctgagaaacaggacatctcagagatgagccttagcgtgaagctcactaattctaggcccaagaattttgcaacaacattacagttgttttctacaatggctgtttctgaagaaaggacgtatacattgaagccaatttttaaaatctagggtggttgatggtaaactttgtggtttatttttaggatcaaagaatttctaagttattgacaaggaaaagatgtatcttcggcttggctgttataattcagcagatgtctctgtacctgttaggttttattggccatatttttcgaatgaaaatagagacatatggtcctatatgtctaaaaaagttacgacaacagaacagaagccattcatttgctgagtcattgaaaagaaatgttaagtaccaatttgtttttgccaattggtgtgcccaaaaaagactgaatatttgaaactggggcctttgaagaatctaggtttctacatctgtggtgtcctcttctgttaatataaagtctctctttttttttgagatggagtttctctcttgttgcccaggctggagtgcaatggcacgatctcggctcattgcaacctccacctcctgggttcaagcaattctcctgcctcagcttcctgagtagctgggattacacgtgcccgccgccacacccaactagtttttgtatttgtagtagagaccgtgttggccaagctggtctcgaactcctgacctcaggtggtctgcctgccttggcctccctaagtgctgggattacaggcatgagccaccatgcccagcctaagtctccttttgtaaagaaaataatcatcccatctgtgttttgaatttaaaataagtatgcattttctcaaactggctgtacatgttgttaatctcctagtatgtaggcagcattaccttatgtaaatatctggctagaagtaaatctttgaaagagaaacagaaacatgacttactttatattagtttaagatagacagagggtttgggattggagttccatgcggtgaaaaccctcttttacccccaaatctgtacagaaatgctttaatctaaagaatgtatttgtgaatcctttggactcgaaaacaccagtgcagagcaaatgcctatctatctaacttggaatgttatacttcagaaatagcatggaatgtgtcagttattgatgaggattgctggaagacactgagcatctggcttcagaccagcttttgatttgccaatgcaaggagcgtctgttgggtttgtaaaacttgtggtttagccactggtccacacagcttttccaatgcaacattttgatgacaggcatgccttgaattatgactttgcttctaacaggctgcatagacaatagctgtatccttgtagataatctggaaggtaggaattgatggattcctctaaggattaggacagaagagttgggcaaagggagtggcacaccttcccattcacacccagcactgccagcaaggccaggctcctttcctcctcctgccttagaacaacctccttcaaactgtacttggagtgagacttgggggaagttgtagggagggcagaggcagagaagcaatttcaacaggtactttgcagaatatacctgctacatttgatcacatattttctgacatttttctatgctaggaagagaaaactgaaaacaacagagaacatcatggcagagaataatggttgacatagccttcggtgcttggcagacccaggtttgagtcctaattctgacacttggtaggatgacatttaaatgacttgcccagacattgtggaccttgtttccatatctgtaatggagccagtatctttcctgcagagtcattgttgaggatttgatgagcagaggtggacaaagtggtagtggagtgcctggcccatagcaggtgctcaataaactctgatgatatgatgatgattgtgtgggttgcttctgctccttgtaatacccctgcaatgtgtgcatgattaactgatcctctgaatatcactgaaccaatagtaccaccacccaggcagctccatcagcccaaagcaagggtgtcacccttatttagtctgtcattaactcctgaccgcattactgacttaacatttcttgcctgcgtccacttctctttctcgtgtcctctttattttccactctgacaactgtgactgtcttctcactgttcccctttccttttatgtggctccgttttaatttgtcttccacgtgacagccagagggctgcttctaaaacatcatcttctggctgaaacttttccatgtcttcccattgtcatctggatgaactttagatgcataagcaaattgcctgtgtcttcagtggtcagcctgggcttatgtctccttcctctgcatccccaaacagtcatagacctggcctcctaccacactgagctccctgcagttgcaggagtgggcctttaacctcaggcaggtgtgcttttgcacatgctgcatctgctgcctggagcaccccttctctccatttgtgagacaaatagcacagaagctctgggtatgaatgtagagttaggccacctgcatttgaatcctggatctccctctcagtagctgggtgactttgggtaaattttaatttctctgtgtctcaattcctcattttaaattatggataatactacctacttttcctgtcaataagcacaaatggatgaagagacataaattatgtaagatattttctatcatagagtaagcaattaatttaatattagtagtataataatgatgatcagtattgttcttgctgctgtttcagaattgcactcaggattaaactctgtcatgatgatttttctgacatacccccaaaggctgagtcgggtgtgtctcttgcaccttcctgttgtgccctgtgttccacctaaaagcactctcacacagcattccagctgtctcttcaactttcccctgtcctgagggctaccttgcctaccttttttcatttttatgtcttcagcagtgagcatggtgcttggcaagtaattagtgctaaatagatgcttattgaatgtattattttcattttacagatgagaaaagtgagattaaaagaatttgagaggtgtattaaagtgttcacagaactccctagattcatatttctcatctacaaaagagggtataatcaagtacttgttagagtcaggaataaaccgagatctctctgactttcacctcctcatttattccactatgcctcacttactgtattttgctaagatgattctgatcaaattgaaatggatgacacttgatttagtgtcacagcagctattctgttctttgaaccaaaataagtctctgaaaatatgacaacagtgacttaagctgtcaggatagaaaaatgttagcaaataatagtattgtgccagaaactttacagggtgcagggtgtttgtgtacctgctgtaacaggttcatactagagaaaagttgctgtgtgtgttggagtgcgcagcttccctgaagacatctcggttcccaaggcagtgctgagtttgctatgtgcttcctaactttttgctgtgctgggaggtttgttagtttctgccttgttagtagtatatatggctcttataatagactgtgagctcctccagggcaaggaccgcttttttatcttcgtatcttccttggttcttcacacagtgccagagtaaaatgctttgaacagtagggaaggagacacacaggctttggcatctggtggaacccaggctcagtggcttatcagctgtgaattgagtaagctgcgtaacctgccaaagccttaacttccctacttgtaaaacggggctaactactctcataggattgtgagacttggagatggtaatgtttgtaatatcctcagcatagttcctggtgctgattcaaggctaccatctctggagcacttagcactcaagcgagcacagtgccttttagtagggagtgcacggtggggcatgctgaatgtgttattaactctctgcatcacctgggtatgcgtttctttatactgatatgtgtatgtgtatatatatatatacgtatgtatgtatatatatacacacatgtatgtatgtatatatatacatgtatgtatgtgtatatatatatatacatgcatgtatgtgtgtgtatatatatacacatgtatgtatgtatatatatgttcctgtaaagtgaagaaaagctgtcgccagaaaaagggacattcatgttttatgtgtattatgtgtgtatatacacaaacatttgtatctatgcatacatgtatatacacacagacacagatacacacatttcaaaaatgaatgtacctctctctggtgacagcttcccttcacttttttttttaacattacatacatattttgaagaaaaaagactgataggatcaaaatggctgcaggcattttatgggcttggggattgtctcctcttccataaagaaatagtaaaacaagaggaatgaaggaagaaacacaagagaggttaacaaatagaaatggaatgattcaccccctttttctttctttcaaggcctgtgtctttacccacagataaataaattcctaacacagtcatgcagattcacacatgaacagcggggctctgcaccgtcttggggtgcacctgcagtgcgaggtgctcgatggtgtgtaacacagcaacatgtattgctccatgaatatccctgtgctatcgaaacctcctattggagaagatatgttaaaagactaccatctttccagtcccaaatcacttgcatcttggaattactgagttgttgaccattactttcctatccttttttattttaaggactcattgttgtgataaggttggacacagttatttttccttcgagaaactttgcatatttttatcttgtattgtcacaaaataattaggaaagtctcctaatttctgtatacctttctccaacacctatctttctagcttgggtctgtaaatgttccaggacttggattatccctttgctggttgagtacctggcatctagcatattgcagcccagaatacgtggcaggctctggggatgccaactcattttaaggagaaaacactcatttttcctgtgacaatgagcatgacattcgcatgcttgcatccagtaccgacttgctgcttttataccaaatggagagacgttactaaatgaacatttcttgctcttgtgtaaatagatagattaatggtgttaagtgaaagccaagcctgcttgaaatgttaacttccttatggggttttgagtttctcttatttttgataaatggaccaatctggcaataaaatccttgcacagtaggttaataatgtcatagctgaactgtgaaatagtaatgtgtgtaccatctctcagcaaacaataatccttgaagcctgataaatctatttccagcccaattgcatgttcattgttacccacaactccttctttgcaaatacaaagcagtttcgtcacatgtatttttaagcagaagcaactagggaagtcaaagacacatagccctgtgaagggaggtgggggacagattcatttttagctcttctgagcccctcctgcccccagggcctgaagtcactcctgagaatccctgcattgctggttggggtgcagtgtaaccttccagtcctccctgagcccaaatcactgatttgctgctggaagcagacaaggattgggaccaaggaagcaaacatcccccaggctcttcagttttcattgatcacttggttgcaagcaaggtttggtgctatttagcccatatccctgatgacaagagaggtgatgtggagacttctctatgctgacttcccatagagctgggaatatagaatctggtgaatgtctgcaggcttcagacagcccgcagcacatacagacctgtgtgcagagcacttcagcaccgcagcagatcgtaaacaaaagacagccaaatgccctccttgtactaacacagaggaggaggtatggccccctcttgcccatctgtagccaggggcaggcaagtccagggtaaaatttacactgcgttgctaaaaaagagaactgtatccagaatcacgggtgattttgaggggattatttaagcgtcagaatctaagtagcttggggcagttcacataaacttgacaaacaggctactttagtcctgtctgactgtatcagcataatagggcaatgaagcttttattcattcaaagaaaggttgagtttgattggcagggcagcctgcctgaacgcgagtggctctttcccccaacacttctctgctatcaattaccgttttgaatacgaagtgtttctaatgtaaaataatgccaacctctgcttctgtcctcaggccccagagtttctttgtgttatttattcccagtctgtgactgttctgaaccttcctctctttactgtgtttttttttcccctcttcttcttctttgcagtctgtaagtgatgtaacattgccagcagaagtgaggttcatgcagaaaacattcctgctctttattttaatcaataacctcctgggtgaatgacatttccaccttagtgatttaaaatcagaagaccaggggatgtccgtgcttgtgaatcaccccgggttccaggaacaaagaaggcatttttgttttttgtaatttccccttcacactacaaacaactgggctctgaagttgatttcatttagcagtcaacttctgtctagaaaaatgtgcacaactgaaccgaacaccgttcttatttaaatcggcaagcgatttgcttcagctgccatctgttggccggttagctattttaatttgatgctggggacattacctgactttgtatattgcattttgatctgcatcatgtttgagaaatatctgcaaatgactctaagggagaggactttgaaggattctatcgaacaaatatgtacatatgtttagtgccgtgctgggcagaggagtgtgggaatgtaccagcgtgtatataagacagtgtgcatcttacctaataatctttatggccagattgagaataaatttttcgaaattttctttcttccgcatttccaactgacccttatttaaaagtcattaatgttgagctctctcatggtatctttatccatttttctaaagctgcggtttctcaggttatcaagtttataacccttgtgagcaagtcacggatggtggaggaagcatgatggagtatctgcatgagacggggggctgagtgtgggaaacttgtgggatcttctcatcctccctttctcagagcacccagagtttgacagcgctttgtgagtgtttatcaagagcctcccaaaagaggccgtggggcgatttgcgaagtgcacaaggcaaaaagtcaatagcctgttttcttgtgctggctgggcttcttgccattaattagttgtgtgatttggggctagtcctttaacccatctgcacttccatctctgtgtgtgtaaaatgaggtgattgtaccaggcgatctctaaacacccttcctgccctgatgttccagaaagcctggttcgggagagagagagacagacacagaaaggcgtgtggcccaatctctgctctcaagtatttcaaccataggagcgattaatattcactacacagattcaaaatcggggctactccagggctggggtgccctcctgtccgtttcttttctcctctaataaactcaaattgcctacaacttttctttttattattattattatactttaagttctagggtacatgtgcacaatgtgcagatttcttacatatgtatacatgtgccatgttggtgtgctgacatgcacacatatgtttattgcggcactattcacaatagcaaagacttggaaccatcccaaatgtctatcaatgcctacaacttttcaacatgattttattcttctcagcattgccttccacacaatgctcttttctatataacttcttcctgtgaggttctgtaatatttgctctgtgcctttcttttctcacattcattatctttcaggtagaaacacccaagagtgtttccacttgaactttcctctttctcaggacagcctctttgccaaacccatcttgacgcatgtactctcttccttgagcgtatgtgcttgcaaacactgtgtatggtagaatcatatgttgccacattgaagacatataagatgcctccagtttctatgttcaccattgtgatcattgatcacatatatgtgcccagttacatactgtactgaaccaaccatcctatgccagacgtttacaaacaaaacattcagaaaacagatggggcatagaggatgataataaggcagagtggatggcaggaatcagcagagtgaataatagggatgtagactagaccaaaggagaaaaaaaatcctgggagttttggttgcaaatttggaatgaagagaatctattctttttttctgtttattgggctttaggactgtgtaaacaaatttaggctggctaggccaggcatagtggctcacagctgtactcccagcaagcactttgggaggctaaggcaggcggaacacttgaggtcgggagtttgaaaccaccctggccaacatggtgaaactccatctctactaaaaataaaaaaattagctgagcaccgtggcacatccctgtaatcccagctactcaggaggctgaggaaagagactcacttgaacccgggaggcggaggttgcagtgagctgagatcattccactgcactccagcctgggtgacagagcaagactctgtctcaggaaaaaaaaaaaaaaggctggctagaagtagaaatgtgtgatcttggggaaattgctcaaattactcgtctgagtgtcagtttccttgttgaaaaatgaaggcagtactagtatatacccacatcatagtgttgttgtgggggttaaatgagataatgagattaaatgagacatagcatttagcagggcacctggcccacaataaggattcagtaaatatttcctcttgttactgttatgtggaagtcataacaccagaaaccagtgccttaattgaagagatacttttagagaaatgggcactagctttgatttgggaggctctgtggtcacaagtccctccaatctaaccagtaaagctttctctttcctctctctcttcccatgccactttctcatgctcatatacatttttttcctgctgatagttatatatacagatctgtcctcactccaaagcaggtcaatattctcattgctgttcgttgcaaagtcataggtgatttattactagggaaaatactttttggattctgcatttgcataatcaattagttagtgttttctgggttgtcttctgcttgcaaattgatttaaacttctcccgtgagcagtgacaagttttctttggacgtgagcacctgacagagttgcagttggtttaggttccatacagcaacatggagttatgttattttccattgtgactcaggagttggcatatgcattctattccttgctggttttgcaggcactggaagctattatttccagagcaatatatggcgaccggaaatgacttcgttcctaattattctaatgaggcttcccaaccattattggaaaaggaagccatggaaattgtgcatcctcacaaaacttagtactgtcagcataacattaggtctaaaaaggttttcaaaatataataccaattggaaagtgtgtgtgtgtgtgtgcgtttgtagtatttggttataaactattatcataactcagggtcactaaaatgtctctctagaaagagaacagcctaacaggaatgaaataatttagtctctatttttgatgaagcaataatatttttgaacagtcagctgaatgccttctaagttgcctgggtgcctaaagggcttagaaagttcttccatggagataaataagctgtcaattcatgatgaagaaaatcaaactcatggtgttgatcttggctgggacgctggtacaagtatgagagaaatttttgccgagatgtagcatagcccatgtgttagcagttagcactccagtgccatactgtgcctctgctcgccttttcaaaaggtaaacatggctgtcgaaataaggaaaagaaaagattaacccattcaggggcatgcacctagtaagtgacactgtagctccctagaggatacaaaaagaataggggcaagagtccagagagtggctgttattcagttactggatttcctcttctcagcaccttctcagagttgggcttggaactgtgggcttggaactgtgggaaaactgaagtgaatctgggtgcagtaggaaaaggagttggtggagatagaggcttcaagaaaatacatgccaaaagccagttcacttgctcagttctttacacttttacaataaaacagggtatttctctgactttgtggtctaaagtcatgcatattttggagcacctaaaagaaaacagcaaacagcttacttctatttgtaccaggttagtgcacgaatgtaaaaaagacctctaaatgttaccctcctattatgaaaatccaaagctgggcatgagcagaagaaagggagagaatcatgctattttttaatttcctttgtattaatacaatcgaaagggggctatcaaagcataacactggcctgccctccagctgctgcggtaggtggcgtttcactcggttgccttgagatttacaaattctaaaggtattttcatgcctccaaattgaacacaaaaggcaggcccatggaacagtggctctgaacttcttaaactgaataatagggcaacgtgaaactttttatggaaagatgttgtttttcctgaagttcttgcagtacaggttgtaggagcttccttttctctctatgccctcggaggtctcacaaagcagcaggctcagtgagaccgaaaacatcagtgtgtctcccatctaggaagtctccagtaataactggtccatgtaatgaaagtttcttctagccaagactcaaatagagaattctgatgtaacttcctgaagagtacactagagggaaaaggggtcgtgggattgagggtagagatacatgaatctctctaagcctcagttttcgtatccttaaatggagacaataataatactacctattagaggtattgggaggctaaaggagacagtgcctgcaaagtacagtgcctgctttattgcaagctcactgtaaatacttgaggttgttactgatttttgttcctgctaatattattatattttatattattggccgtagtgtttcaactagtcatgtgataccgaatatgccatggaacagttttttggcctctaaacttttcgcatccacaaaatgaagcagttggatcagaagatatctaaggttccttcctgtgctaagatcctagagtcctaaagttccattcttgttgttgtaatgaagtgaaaagcacacatattcataccaaaagggtcataaatttaagattcttctgtggagggactgggaaaagtctttacagttttaggttgtaattaagaaagtgaattatgctaaaattgactttaggaaaacaatggtgttttgtgtaaccacatggatatcatctgggtatatgtaaataggaggcaggtaaaaatgatgaatgctaatctctgtaaaattcaaatgaatattaactcttattcaaatagcacaagtacattgcacagggaaatcaagacgtgaattcatataatttcatttttttcagctgtgcacatcctttggttacagaaacagctcagaacttaggcattgctcatttcctaatagagtatgacatctgggctgctacttttaaatatagtagcttgtttgctcaggcttatggctcagtaatatttgttttgtcttatgaatgtagtgaaagcagggattacaggtattcctcaaggactaattagaaataaaagcttatgtatatgagggaagttttcggataggaagtgctcttgcttgagtcatgaagtgacactggtttcagtttcaattttgatacattggaacttggtactttttgtagagtccatttggaaaggttaaaaaaatcacttggaattatctgcagaagttcaggttaaaaattgtttgtccttcttcctcggtttcaagctcctctaccctattgacaaattcataccttcattcctctgtttggattttaggaaataaattcaagaaaagaaaaatatgtaactatcatcactgtttccataaaataaaggtgttctagagatcaaagagaggccttgtcttggaaatacaatttggccaaaactgcctggtgtgtgtgtgtgtgtgtgtgtgtgtgtgtgtatgtgtgtgtgtgtgcttgtgtgtgttcatctctccatgattcattctgagagctgttttagccttcataaaatattcatgctagttgtgcatggttctataattgccatctcaggccttgaattatttataggttgtactgttcacatagtctcatttactgatagagaagataacaccatacaagaggatcccaaacactctgaggcctgttactttgcattaagtagtggaattatattactgtaggtgtaaaacactggccttttttttcctcctctccctttaatatatcatttttgtatttataatatgctaattgtcagaatgctgttaagcctcataattcctgccgagtcttgcagaaatcaagatgtggctgagatgatttagctcttgatctcagaatgatcgttctaaaaaaaacctgtctacacacagcgtaatttattgaaatgatgtatgactttacatgcatacctgagcccttttgttttgtactattgatcagtttgtatgtctcagtgttaaccaacacgtggttggtttcggtagacatttaccaagagccttgcaagcttgctgtccctaattaaatactgagtctcaattcacttgtgtgacagtttctctgcacctatttattttgctttcctaattctcctttcccttttctgccaacttgatctttcttccacatagattatattcttgatatttatttgagggtaggaacatgctataggaacatactatagttgtatctcctctctctttttttggtgttatttagttgcaaaagtccatttaatgttaataaatatcaaaagccagattcaccacagagtgtacttttctggtatttcattatcagtatccatgtttaaagaggaaaaacagaaaaattcatggcagctcataatctgctgatatattctagttttctcctctaccagtggaaactcatgaattttcctctggcctaggaacttccaactctatacaaatcactaacaaacaatcctccatctcctctctttaggctgatcaatattttctctctagccttctttccatcatacaggttgtgttcccttatgtgtgtgatgtgagctttcccatacctatattagccaactcgcagcttctcactgttgatctgcatactgctggtggtggtacttctcactgtatacctacatactgctggatgcttttaagtggtacctgtaggtgtctttaaatagcactgaattaggtgataaggaaatcatcttatttaaaatttcttttagttttcctgatgaggccaaagtccttgtttggtgggaatctgtctttaacacctccctcacatttgcttcatcttggttttcaatgagtaccctgtggtaggcaacagtatctagccaaaatttagtaaatttttaaaattttgtttacattcacttttaattatgttgctttcttttatctcagataagtagtatgggttttcattcatagtaggaatggaaagtgtcattcaaaaataagtttattagggataaaaggaaatgagtcagtatacataaaatattaagtgaatattattataggtaaaaatggcaaaaactctgaaggtgctgttatgagtgattgaagttcagggaacactgtggcaatgccaaaatgtggcgaatcactctagagagctgtgtattctatagagtcaaagggaatggaagggttgagtgatgcataaaaagaggatgtagaatctaagatgctagtgggggtaaagacgtgcacttttgggcaattcacttatctttgtctttagacagtaaaatccccactaactagggttctggtcagtcggcttttctaattgaaggttcacttgtattgatgaaaatcatttctaatggcacaggagtcccatttccactatagtaagtcagagttgagggagaaattgactatcattaatgaatgaaggttttcaggttgttttaagccattgtggatcttgtaatgttgattagcagtaaaaaaaaaaaaaaaaaaaaaaaaaaaaattagtgtcattcttgactgaagagccctggacaaaggtatggcttttgataaagccaaaatattagcttgttttgttattcaaagggaatgtgctctgggagatttctggtctacacccagggacagtgcctggcatattgtaacagcttagcacatacccattgtattgaactgaattaatggtatgtagcagggctctgattaactaatagttcctccaaaaatgtacacacagaaaagaaaagtgaagcatgattgaagatgaaataagatcattgtttcatctaccagtgtatcccacagagtaaatgcctatgtttgtacactgggtggtggcccaggaataaattatgtagttcttaggagctttcgacagttcacttgacaagagtgaattgtgtgctaagcaggttttaaaattaaaattcagatatgaatgtcttgcattctcatttccttccattctatcaccaaaatcagaaaagaccaaaaacagggccgggtgcagtggctcacgcctgtaatcccagcccttcaggatgccaaggctggtggatcagttcgcggggtcaggagttcgagaccagcctggacaacatgataaaaccctgtctctactaaaaatacacaaattagctgggcatagtggtgcatacctgtagttccagctacttgggagtctgagacaagagaatcgatggaacccaggaggcagaggttgcagtgagctgagatcatgccgctgggctccagcctgggtgacacaatgaggctccatctcaaaaaaaaaaaaagaaaagaaaagaccaaaagttttctacttgggtagataggaaagtccagtctaaaggcagagggaagcttaagaccatcatggggttgggatgactgcatctctcctgactacttattagtgtctgttttggcaacagaattaggttgtgaagtatgttttgtaaaattctttccactgactttccatattcttagaaaagccatggctgcaattccaccaagtgctctgcacctgctgtggtaactacctgccttcttttaggctttgatcccattggacctgactgttccaagctggtgctgtctgggtttttgttttgttttgtttttagttcaattctagaaaaatgaatttggtgcattgctgtaggaagagatcctggatcgtaaggctaggtctgaggaaggttgtggccccaactctgcaatgaatgaactgtgcgtcattgagcaaatccactaagctatctgagcttctatctccccatctgtggaaagacatgactgaattagaggttctccattgtaacattttatgattctatcattcctgtttccacctatggggatggacttcagatccttggccagggggttttataaagtcagagcatcatttgtcataacttaaagaagactgcttgttaaacatttcttatttctgcctccctagacatgtgaccatctgcaagaatgactttctggctatttcctccctattttgattgttctacatattattattattaggtaaatattcctaatagcaacagttgtgttaatgcaattgtatggcatttttttccaagggagcccaaatgtgtctagaactttatttaattattattttttaagtcaggaggggatggtcatgcagatttgttctcatgcagaactttgttttttctaactacctggcatttggttttaatgtcttaatttgtcttctgcagcaatctgcatgtcagaagttgaacctctccaagcttatgctggtcttagaccctaaggcttgaagggaaagtagtagcagctagatgagcacctcacttatctgatatttcttccaagtagtgcctggtcttttctagaatgtgtgctgtgatagggaattcatcttgtaaggcagccccttcactattagagagtatttttttccttctgtcgtattagagtgttccttcttgactgaattttcaggctttggtcccagtctgtcctatagactttttaattgtaagtttgctgcttcgtacaaagagtaaatagttcaaatatttggaaacagctatcttgtttcatcaagacttctctctatcagactaaatattccttcaaatattctcctcatgatcttgcagagtcctctgatgccctgtccactctatgttaaatataaacaagtacaaagagccagggcattaggtgaaccagatgttggttcaggtttcagaccttgctatgtggttgtgggctagtgggcaagcctcagatttctcattcttttttctttctttttctttttgagacagggtctcactctgttgcccaggctggagtacagtggtgcaatcatggctcactgaagccttgacctcttgggctcaggtgattttcttaccttagcctcctgaatagctgggactatgggtgagtaccacagtgcccagctaattttttgtagagatggggttttgccatgttgcccaggctgctcttgaactcctgagctccagggatcttcctgccttgacctcctaaagtgctggtaatacaagcttgagccactgcacctggccagatttcttaatcttcagatggtgatgatatttgaaaatgcctaatgtcatccacagtctatagcagatgctaaatgaaattttattgcttcctattactaactttattttcttgtcctaaattatgacatctagtaatggtggaactccagaaatgcccagtcctttctggaggaggggagcagaatgttcacatcacctcaattatgaacagtgtatttttaataacatggccaaatgctattttgcctttggttgaagtggagggcatgcacacttctgttgtgggctctctaaatctagtccttgccaatgtgctttggaaaaaaaactttgttttggcatgaagtgcactgcttgttgatacacagtggcagctttggagcatgaaatcttgctctttatgagtatttggcatattgtggaattagagttttgccttctctgggttttcttggctttcttcaacagcctccctacctggtccccaaaacaaaacagcaggaataaatatcaccctcagacatgcctctttctcattcaaaagaaaggcaaacaaaataggtatcccctagagcacagagaatagactctccaattatcttcatgaaagaataaagacagtctttccagtgttcacaagatcaagtagtgaatatgtcatgcatgattccaagtcactggcctggatgaaaaggcagagtgaagtgaaaaggggatggggagaccttggatttgggtaggtcccaaaagatcaaaacaaaacaaaacaaacaacaaaacgtgtgtgtgtgtgtgtgtgtgtgtgtgtgtgtgtgtgtgtttattaggatctgggccaattagggaaaaaaaagagaacactactaatataggaaaacagaatgtttggagaagaggaaataggagggtctcaaggatttcatgcaatgaaatgatgttaaaaggtcgggggcgggtattccctcctgtgaccccacagactgaatggcaatgcctttctctctagtgggctggactgaaaagtgtggtgtattctctcagggtatccagatcctttgggtcctcccggataagcaacagcacattgttatgcaaattgttctattcccagggggatctcactgcgccttgtgaagccctctctgctgggaaaagcacttttcagctgtctcctcctgggttgatatctttatagagcaaccagagcagacagcattctgcattttcttccatacggcggccagagttctggtgtcttccatttttgccttacttttacacacatacacacacgtacacaccctaaaccaagtgcctttttcctgtgacacactgcagaaaacaccagtcctggacggagaaaaagttgaatgccacatttcatgattccaaaggaaaagtacatatcatctttcttttctttcttggtccggctttgtcaagagaacatgaaacctccttcgattgctgttagttgattctatgaagtcattttgaatcttttcaagagtaggttaaaagttaatgctttcaacatcaaccatgttgaaatcatttcaagttttgcttatgacattcccacccttttgtccccagcaaagcattgccatggcccttgaccactatgcagcattttcagcatcttcactgcatgaaaattgtgcaaacacccagagacaggggcaccatgtaatcacttgacttattggtctgctagtctgtactgttgcacaccatgtgtggctgtgtgacgtgtgactccagaccgtactttgaagccattttcttgagcatcagacgttgctcagttttcacataacaaaaaagcactgccctttcttcactgtgaacttctctctaatgtattaggggacgtgaagggtgttagtccttgaactagacattcacagatcccagaaaaaaacaaacaaacccaaaagactgaactgggcagtatgttccctgccagatgaagtgcaatgcaagtactttcctaatagacatgtaataaaaacatgtttggagctctcttcttaatttcctttaaatttttgagtgatttttttttaggcagcatgtttagctctctaacatctctaacacataagttgaaagaattaaactctcagccatatacacacaaaattaaactctataaactctgggtttataaaacaggaatctttgtctagacatttaaatcctaaggctattatttcttaatgataattcaatgacagaatgaagaatatggcaaaaaaaaaatgaataggagccattttttatgttgtttgtttcttggggaactctgatttgaatcccgtccctgatatttgagcgaaatccttgtgtcagaactacataaagaatttccagatgtagatatacagtctttagagaaaaaaaaaattaagcttttgtaggatttgtatagtcacatggtaatgctatcttctgagttttgtaggcaagtagaaaaaacaaatgaaggcagagtctgaaatggtcgaatgctcatcaaagaggagccataatagcaaccctggaaaatccacttcaaacttttcaagtatctagtttttcaaatgttgttcctttttatgtccattgtaataattagctctgaagctaagataggattacagggagaaagaaaatattaacaataaaatatctaaccatatggaagtcttggtacactccaataaatggagaggtgttttcttcccgcaaactaaggcaggtgagaattgtctgccctaagaactcagcccacagagctgtgaccttgtatgcagattgattcccaaggaaatctcaggccttctttgcccctagagttttgtcgctgtgtatggtgttcaatccaggtgtgcaaagacccaaagtgtctctgtagttccagagctgcctctgacaggggcaaagaaacaaaaaaagggtcgccagttaaagaaacactgtatcccatcttgaaccttgagttagatgaaaatacggaggtaaagttacacccaaattacatactaatgattttttcacatatgaaatcatggcttagaagaagatatagattattcaggtctgtttagaagcaaataagtaacctcttccaacccaacacccaacaaccaccaattttgtcataaaaactcaggcccttcctctaattactggtattctaggcgtaatgtgaaccctctcctttcattgacaccattattagctgggatgtcaggctatcctgaaacctggccaggcacaatagagcagaacttacaacaaatttgaaattaacattgaccacttttatgggactgtcatggttcctagtgctgcatgtttaaccttttagagaagaaagtacaggggatattgcacagctctttgtgaaaaattatgcatcatatttattccatgtttgtgcctctgtgtatgttggcatgctttgttagtttgtgtggtatgtctgtatgtgcttagacatatgcactatgtggctttatatatatatatatatatatatatatatatatatatatatatatatatatatatatatatacatatacatatatatacatatattactggagtccccagtgtatagtttatagtttggaaagaaatcatcttccatcattcgtcactgcctagctgttgtagagtgggccagaacatcatttgttaacggcgacaaagctgcactcataaacgccgacatgttacattaatttataggcactgagtgacttattaaaagtgacgtgtgaaatataacagggcccggtatggatgattaggtttcgggctttgaattgttgacaaggcaggggtaatgaattgcgggacactggctcctgcatttccccctcattagtcagtattagctacattaatagtaataattggatatattcatcatttaaaatgttttaataaatgtttggacagtacccgatcagagctgtcaaatattaggctggaagggttgtgacaagagaaaaatgatgatgttccttaggtgagagatttatgcagctttggagatgccagccttgactttctactccctaaggatctctcagttcagatgagttagggttacaaaccatggaaatggggaaacctgactttctcctgtctcagaggacatttctgcaagaaggctttgaaggagatcaagaggccctgtccagagggactcaggtctgcaactggtttgcctaggatggcctctgggaagagattaagagacccagctctgacccaagttagctttgtggccttgggcaagtgccttcacctttctgagcttccatttccatgcctataatatgtttcatttgggtccccttgagatctaacattgtgtgagtttgatcatcaaatgtgataccattagcctagagcaacctctaactcacttcctcctttctccactcttactagtatttattgaggactaacgtatttgctccaacgatggtgaataagacctttcttttgcctccaggaaggtgatctgcagacattctttaagtatttgcagcattatctctgtgatacggacatggttatattcctgcagtaattggagcctagatgtacccaattttatggtttagttctttattgatctttctctgttactgtgatcagattagagtgattgtattatatgcaaaagatctgggggaaaagttttagtagaactgtaaatggctgctattcccctactctactacagcaaacacaacacaacacggcacaacaaatatatcttaaacttgaatttgaacaaatgcagattttagatcaagatggaaatgattgtgatcccattatcaccattatcatcatcatcaaatttgtactagcttaaccttactgagcatttactatatgccatccacagcccttggaacttcatatatattcttacttatttctcacaataatccttcaaggtagatactatagttctcattttacagataaggaggcagaggcttagaaaggttaagtgacttggttatgatcacacaactgataagtggtagggcccagactggaacctttttaaaccaagttcatgtcataaccaacctgctgtgctgcctctaacattttggaggcttgctcagttctggcataattgaggaggggtgttggctaatcagagagtatttggaaaagggtgaacaggatgggaagggtttgtgaatcctatcttgaaggggtggataactaaaataggtttatcctggaaaagagtcctgggaagagaaggtgggccggtttctctgatttaaattatttttgggttgtctcagggaaggaggagatgtaatgctgctatctgaacccgagctcaaaactgaagtttctgaaggtaaatgataggagggaagaattcagttctcaggaagagggcacctcctggcagagctgtccagctcatatgggaaggaccatctcccagtgacgggctgctctctgttagagatagaatgatcctgcctctcctggaactgccgtcgcatcacctccctcctcgctcactgtgctgcagccacactggcctttgcactaactggaatgcttttctgggttttggcatggctgggctccttcttgcccttcaagtcccagccaatatatcataatttccaagatcttctcttctcccctttctaggaaccatcactttccatctgccatccattcttttctaatagctggagtcggtaactgacattatctttttttaacttgtgagtctttcacttgttttttgtcttttttccccactagaaagtcagtcgttggagggagagtgctctcctatcttctccactccagcaaccagaacaggcatagaactactggggcaaccatttgtcagggacactgcggaatggatcccttctttgggtgaaaagctactctagacaactccaatatttattcctcattctcgtagtctgtgagcacctcatttttacagcagtttcccttgcccctttggcttggcagaaaggtaagaaagacaagactatttgagattttaagtaaatccagtgtcagatctcggttagtttaaaagccagtactctcttcatatctaaggtggcccctgagttagattttttttttttttttttttttttttgagacagagtcttgctctgtcacccaggctggagtgcagtggcatgatcttggctcactgcaacctccacctcccgggttcaagtgattctcctgcttcagcctccctagtagctggtgtgtaccaccacaaccagctaattttttgtatttttagtagagatgggcttccgccatgttggccaggctggtctcaaactcctgacctcaggtaatccacctgcctcagtctcccaaaatgctggaattataggcatgagccaccacacctggcccctgagttagattctatttaccccctcagtaactctgtgaggagtctctgcatctgctgccattgagcttccggtttctgtatattttcatgagactttggcatcatttacgtaaaatatgtttagagcacaccaaagaaaaaggtttgagttatattgaagagactttatagagtttgtatttattgttataaatgatattctgcattttatgaaaaaaatcaagattatggtcacacagtataaagctgcagatgttttttgttaatacaatttggttttgcaaacattccagcatatttttttttataataagccatgatactctgcacacacacacgtggtttacagctagagtgtcttcaggctcttggtctttgttactttattttggattctcaattatttcttaatcgtaggtagcattttatcatttgttgttccggaatcaagcagatatttataagctctatctcaggttctgaggatacagagatgaacatacatggttgttatcttcgaggatcttactctctcattccggggagattggtaagtggcagtcatagagcaatgtgacagatgtggttctggaggagtgtgccgttggaaaactgaggtgggatgttctattcctgtcgggaggaacttgggaaggcttcctagagggagaggtaggagttgtgatcattcttgaaatataggagattttttagaccaggaatgggcaggggtgaggacttacatggggggaggcttaagagagctcagagagtttaggaaacatcaaatgagttagagttccaaaccataagcatgaaggttacaaacctttagcataaaggaacataaaggataggggacaagagatttagctgactgggtttttggtgccaaattgtaaatggtggactttatgccatgtgacagtgagaagagatcacatataatttgagtcactagcagttgtatttgaggctgacctctcaggaaaacaaaaagtcttcaaaatcaaagtcagggtctgtagaattcaatcgttcaagaatgtgagtctaatgaaggactgctgttcctgagcagatgttcttgttgaacaatttccaggtataattttaagaaaatgataatcatattgtaggtcacttgttttgaattttccttaaagcctaagttcacaatatggtgtccactttgcaaaggatgcagtttctcagggaggatataacttcattcagactttaagcagagatcgcttaaaaaatgagctttctctcaccctactcttggacatggtatcttggtggtagcatgggccaagtagaaaacctgactgtatccaatattgacttgctttgctgtagttgagtccttttctcagccctgtagcaggcacagtgggacaagcatagtggcacgtagggggcttctctgagatagccttcatttgtagttacttctagtccaagatggtgactacactgtcatgggtttcaatgcattgtagaatggcaggtgaagacaggttggatcatggatatgcaatatgtgctgcttgcttcactggagtttttgtttgtttgtgtgttcttgttttttttaataaacattggatgtccctggaacccaacttatcaaaaccatttacaccattgggccactttttgaagttttcccagcctactttggctgaatctgaagttaccttgacctttgccaacatttttttttcagatgaaactattttaccctccatctccagcaatctgccacctttgactcagaaattcttgttaattattttaaggcaatccttggttattcagataaaattttacatacaagaatgttcaccaagggattatttatcatagcaaaaaaatttgaaagtaatcaaacattaggagatcatttgaatgtctactgtatatgatgaaatgttatggagtaaaacaatattttgaagatatgaaataacataaaaaaggatatagtgtctgtatatggttattaaatttgtatgtacttgaagagattgagacaaaatgggatacaggtggcttttatttatctatgaattttggattttaaacatttttttttttttacaataaatcaacctttataagaaaaaaatctagacactatttcaaaatatgccacttggaattttaaagaggtgtctctatgtaagatgccacataaccaaagaaaaggcaaggtgatgcatcatggccaaaacaagtgggaactgctaaagtcaaactaaactgctttggccctgggatctcattaagcagcagaggagcattaattgaaggcagcatttgactaagctaattccggacatttctctcaactcctgtgccattggtttcaagttgcagggaacatttctggctcaggccaatggagggagcatacataaacatggggtttattttgtcagggatgttcttgagagactcaattctctactgatctttttttgttctttgtggacatttatttacttttgaaaatgcccctgcagatcctcgcttgagtgaaaaggagatgtgttctcatggcagggctccattgctgatcagcaagtctctaaaaattgagtgtacattcggttactgctgtttttaacattctactaggttggcttcatttttataaatgaatgatattttcacaaatccgcatttgatagacgccattaataatgtttctcttcaccttccagttcctttatttttttttagcctgcctttgagtaagattcttgataatgcgggttcttagctatcaccttgaatcctccaggggacacaggggacaagtgaccagaaaaggtcccagttgattttactcatcacccctttagtgagtgcatgagaagagaggagatttacagttaaggtcctaaatcagttctggctgttaaagcttttgttgaggatttagggaggctaaagctaaaactgagtgtcgtcttggaggttaatctacccagctctggaatgtgtgtcctgctccctgtgatactgacatggtgaaacagctgatggttagaggcccacgctcacccttgtgcagggtgctggaggtggatgtcatgatggcgatatcagagttctgaggcaaaagggatttatgcgccgagacacacatgcaacagagacgcaagatgcgccatgggcttggactgaaggggagaaggagcaaaagagtctgagccatcagaaaatgtcacttgtttgtcttaccaaaccttaagcaacaattcttaaaattcaagctgaccacgttggctcagaaaagcaggcagtgagggttttcttgtccttctaaaagtgaaaagggctcagtggcactgaagagaaccatgccaagatggcagccaagtcctatctcagtggaaatcgtgagaggtggctcctgtccacatggtggtggcttgtctctacactctgagtggggtcacttataccccagatctgcattcttatgtcagaagccagggtgagtaggcgttcttcacacatatgtgaataccttccaaagcatgatcaggtggctacaaatagtgtcgtgaacaagaacacagatattggccttagtcatacctggatttgaatccagggtcttgcaagtactagatttgtgatctcaggcagatggactattgatagtgtctaccttagtagttactatcttagggttgttgtgagcattcaataagatgatgttagtaaagtgcttagcaaatgaccttgcacatagtaagcactcaaataatggtaactttaaaaataagaataattgtaatcatgttgatagcatcattagtaggtgcggaactagaagtttattggcagtactgtggaagtgtatccatcaatacttgtcttatttttatggagatcccaaagtgaaatattagactaatgttcatttattcaccaaacggtgatgtataaacaagattctactaaacattgtggaggaaacaggattgtataaaatacgttcccttcacatagacggttaaaatctggttggccagatatgaaatgtaaatgcagataggcaaagtacaaggtaataagtgaccgatgagatatcaacaaaagccttgggaatttagataatgctgttctggccaatgtgatcaaggtggatttggagttggcttgaggagtgggctcgattaccttgcaatagacagctttccagacagagggaacagtatgcacagaggcttgaaggtgggaagtggccaacttccggggccaaaatgatgaagtgtttgaccacaggttaagtgaggggcagctttggaggtacaagtgaattagtttcagccagaaatagtcccaagtgtagtcagtgaggttcagcaaagcctcaaccctcttgaccccttctaggtgttcacagccaaatgaagccatcagattcatgcacagatacccaaagtgtaaaatgacctcagaattgtaagaaagacactcacagactttggacacctcagttgtatggagaagtgatatcaactccgaatgggaaaatctgggaagtcttatggggagagggagaatcttaaccagacctggaaggatagggggtctttagaagggagagaaaggcattacaggcaaaaggaatggttgagctaaagcttggaggtcagagagagctctgattttccagtgaacatgggccatattatatatgaagtccacaaagtgattctaatttgagttaaagaccaatgtaaatgcatatcacttgactcaaagggagggcagataagaactcttactggcccttttttcacattaacattgagatgcgtctcttgtatggaaaatggagaggggctgatttttcttttggtagataaacatgttgttggctggcaatgattgcggtgaaagtcttttagaccacccatggatgtcgggcagaagcagactgcctgagtcctctactcctaaagctcactgtctaaggagccaagacagctgcccattttgttcactgtctccctgtcactcacccggccccacccctgacctcattaggagggctttaccttccctgaaaagtgaaccaactacttccacaccaaaagatctgttcaagccaagcccctcttcctttcctctgagcccccatcttctggagcaggctgccttgatgtgaaatatagaggcacgttttaaaaatgtatgtttcagaaaaaggggaccttgtttttaggggcaacagagatatgaaacttgatattttgcaacataataattgtagcagaagcacagaggagagaatttggggagattttgggggacagccagggaagtgtcccagtgcatgtgatatttgatggatgggattattcagcttctactaaatgtttgtcccttaagccttggtttctttactttatactttgctgcttcaaaggaggagaatgcagtcttcagagcaagccagtgccttccagatttgttatctaatgatgacattgttatccagaggtggctttattttgaagtgtgtctgtgcatgtgtgtgtgtgtttaccattcttttgagcaagcaggtatgaagaagcagtacctgagaaggcagcatgtgtcaggcgggtctgctgttctctttgaagaattgccatgtctcagcttctaaatttcttaggaacctgaactaatgcaagtttaccactagatgcagccggtgaaatgccagtgtcatattacaattaacagtaattctggtggctgtcatcacttactccgaacagaggatctccagcaaaagcatgacaccgtcacggctgctaattcaaaggcattgtgtgaactatgacagaccttatggtgcaccttttatgcttattcaaatgaataaagtctagccacttaaatggaggagagggagaaaaagttttaacacatttctgcagatgagcccacgaagggtcaacttggaaaaaaaagttgtgttaaggaaagtaattaaacagaggcagagagattgaatattagtgattttgcagagtaaatgaggataaattctgttaattatgtgactttttccagtactaatgtgataataaagtactctaattctagagaggcttgtcacaatcccagctaaggcagtgacccttctactaggtgagaccaagaagcaacttataaagctttccagcaaaaaagcaagaaatcaaagttaaatggattttttccccgtctccatttttagtatggaaaactgctacccaacaccatcatgaaactcttggtgaatggactgtcttacttgaggcacgaaagcacttacacttactttttttttgcttagttcttgagggaagaaatgtgagcaattcaaagagtataaatagcccagtgcaggattctagtccaatgattaacagcaccaaaaagattatacttggaatgtgagtgaaatttggtcttcgggacttcaatcttacaaacatttatgtcattgtgaatgggtaggaacttgtttttaggggcaacagagacatgaaacttgatattttgcaacataataattgtagcagaagcacagaggagagagtttggagagattttgggggacagccaggggagtgtcccagtgcatgtgatatttgatggatgggattatgtgttgttcaggtgagaagggatgggagaggtgaagagaaagtttgccaggagagagccatagcatttgcaaaactactgagttggccaagcagaaggggtgctgagggaatgcagaaggatctaacagggttagatctaaccaacacagttggtcttcacatcaacataatctctgtggcagagagtaggaggcggaagatggcaaagatagttttgttccagatcacaaaggaaggaagtgattgtttcaagggcagaagaaaggtttgttttgttttgttttgttttttctcgcttttaaaaaatagataggcatgttgccagattttaccatgcagtatctaaggactgagggaaatatggtagctgccagtgcaggcatattgctgtaccctacagtggtaaagggaacccagattcttagcccagttgcagttcttatgagcacaagctgtctagtgagactttgcgttcaaatattgtctatatctgccatgagctatctgttggcaggcaagttactaaatctccctgtgattcagctggtttcttacctggtgccctgggacaggaatggaggcagggtgagtggatgggggagcgtagggttgctgtgaggactaaaaaaatgtactaaatgtagtataaacattagctatgcttaactcattattatttttctaaagcctagcacttggtaaagtattcagttaggctactttggagcaatctttccttctaaaagaatcaaccatcatcaaaggaaattggtattctgagtcatcttggctaagaatcaccacaccactagagtgtgcaggcaaacttgcttccataattcaaggaaacatacataaaatcccatattttcccaggctgttcactttgagaacaatttatcatcattatctttgtaagagaagagccttccatatcaaaaataacactcaaaacactctcagcgttcagggaatggttttggaagtagactcattgagagggaacacatactaggttcaagcagacccagtgctctctcacgacacctcttggcttaaattggggtgcgggattgtgtcaggtttctctcagaggcccctctctgacatctggtagccatcagcagaagaaccccagagacagggatgaaaactcagagaagaattaaggatctctgttgtagcctgctatacctgcctgtagcttcttcttttcttaaatttgaagactctctactttgttttaataaactattgttttatgacatttttatttatatcctccactttgtgtggctcttcctgccatgcttaagaatctagcctggagtcaactgagaaagacattgaagaacaagtgcgtgtgtttggagcagggcagggggtgtcccaccatggtctcgtttcagcaggtgggtccttaagtattgctggggcaggatttgttttcatgtgttatgctacagatgaccagaggtgctggggagaaagtcctgatgcatagtcactgttatgagttagaaaattcagaaagttgagaattcatcaggcgttcatttacttacttactcattcacttagcaaatatttgactgccagatgccaagcaccgtaataggatctgggtatgacgatgatggggaatgagagggggatcactgaggtaggatacaggaagacattcctggggagatgacatctcagagacctgaagggtgggagagaactagggccaaatccctccaggacccagggtggggaagagcttggcattctgtggatgtgaaaagtagcccccatggctggggtgctcacgaatgggaactagaggctgccactaatcagctgggtgaccctgaccatgtcacctgatttcttggagcttcagtagactcatctgtcaaatggaagtgactttatccactccctgtcatatacttcaagacttttcgtgaggatcagttaaagaaaagttagaaatgattttttaaagtgatgcacagtttaaaaggtatagcctgtttttaaaaaattgttattgatttagtggaaaattattgcctatagaatttagcataagtttgaatacctgtttttgatacaaggaagtttatcctcattaataccagaagctggctcttatcacgtggttttacttttaactcgctgcaggggaaatcagtgagttctatgctaagattttgctctctgttatgaacaatattttctgggcccagatcctggttctttcacttatatgtgacctggggttcttttactgattcccctcgcctcagtacattcatctgtagatgggaatatagtaggccctaacattaaggggtggtggtaagaattcattagaatgaatgtgtaaatgcccagtgcctggcatgtgctgaccaaaatgggagctctttatgtgaaaatgggagtgattcccatgccaacaaggcctggccagattcaagggtcctcccattaaatgtaggaagggaaaaaacttgtttgtgctgggtttgatggcgtcttctttcatacagagagttccaaattgctgacttttgaggccacagtctctttagaagcaaggaggaaggcaccgagtcagttgttttgtttcctgcatggttaattggttgtaaaatgctactaaaagttactgcttctgattaaattaagtgccctgggaaatccagctgtgaacaggtgggtattggaggttttccctgtgtctctattcactgtctgtggacagcctcatgctggtaaatatgcactgccttcacttttgcttctgggaccagatgcttttcccaacttctcccttcacccaacccgtcagctgccaaaggtctgggagaaaatcaagcttgactacatctgaatttcaagtgatgcgatccttaaaaataaccaaacaaaacatgccattgcttcaaaagcaagaactatgtttgttttttaatgagaggagtcccatttagtgtagccacaggggtccttgttttgttattgtttttattttaaaatgggcacaaagtgaccctgccctagtcttgcagacaaatgacttgctgccactttggttattacagtttagggccggagatgcaaactgcatccctctaccagatttgttttgtctggcccttctgtggtttggaagattggcaaatttcacacttaacaatatgcatttccagcttctcttcaaataggagggtctgacaacactgtacccatattgccctgtggagtcagtcggctggagaagagtcaagctgtccctgaagacaagacgttgactcttgagttctgataattcccagtactctctgtggttttacatgcagcctagttcactcattgattgaccttcctgggctctgtagggtctgcatttgagactctgaatttaaaagcttctatcattttgaaagttaatagcaattctgtatgtgaaataaaaaatatatacataaatgtatgtgtatgtgagtgtgtgtgcgcgtgtgcatgtgatagacttaagaatattgaagttgtggagcctaaaagttaccagcactctattgaatattctctctcttacatttttgagactgtctcgtctcctgccaccctctcagcacacctccttctccacttctccttatctttcttggagggcattgtatgatgtaagctcttcttaccttctctcctccccacctatgaaagctcacttttccagtgatctctacaaggtggaatatgaatggattatattctattatagattcatctcaaatgtattgaattttccagcaaccccagctgcacatctttttgggttcaactctcataaatggaaattccatctctttttttaaagccgcccaaacaaaaatcctgagactagctcagatagagcctgattggcttgacttgggtcacatgccagtctctaaagcagatatatagttgggggttatgatactctgactggccaggcctaaatcacaagtgcctctttggtccaagtgtggaatgagtttatgctgctgaaatgtaaagactcttgagtgagggcgaagttgttctctaaaaaagagaatagcagactgttatcaaaacagaataaaaaggattctggcagtcaattcagactcctgtcctctgaagcctctggacccattccacaggaaaacaagtatacaaaagtttgcatacaatgttggggtgatcacggatgccatgtagaccacccactgactgcaggttaagaatatctggattagatcatttcttatcccattccagcatttttttgtaaatgatcaaccaattttgtgataaaatgaaagcttttttcagaattatgttttcagtgtttcaggtttaaactgaagctgttcaaaagtgacatgcggggagggcaagcgagtgacctgtgagctacaaagcaccctcagaaagtctaaatgctgtcattgttcgtctctgatactgctttagtttcattttccatcagcatccttatgatatcatgagaaatagtgcttaataaagtgtcagactctattttgcattatgatttcaaaatgataaatttcttcttatatttttatggactagaacacacaggcttattggatcgtctataatatagactagaataatttggagcacaggagattattgtcagtgctctgtgggcatgatgctcgctggtcatttttatttgtagactggtcctgaggtttaaatccaaattaaggagtcacttgtttttatctgagctcagcttgtgtggcatgttgggatgcagagattttttttcaatgaaatccattgctcaaattaaattcattatccccaatgatgtgtgaggccgggggatgacaggcaacacatgaagatgctgagactgggacaagggagggtatgatgggaaaagtgaacagacagatgcggtgaatattaaaagggtaatgattatttaaaatagtttcaaaatacttttcatccttagcaagattctgtgtcccccaccccccacaccttggggaatagctttttcagctgatcccttttgtctatatgtacttttttttttggttgaaaagtgagtttatttattttccttgaagcataaagtttccaaatatcagctttctaacgcaaacaagaaccccttccctcccctccctcccctctcctcccctctcctcccctctcctcccctccccaccctttccctcccctcccctctccacccttcccctccccttccctcccttctccccctcctccccacccttccctgccttcccctccccttcccctgcccctcccctacccttcccttcccctctcctcccccctgcctcccctccccacccctccacacccttcacctcccctcttctccttttcccttcttcccttcccgtcccttcctttctattcccttcccttccctccttccctttccttcccttcctttctcttcccttaccttccattttcttcccttcccttcctttctcttcccttcctttctttccttcccttctaccctttccttccctttacttctcctccctacttcccttcccttcctcccctccccttccctttccttcccttcctttcttccctgccctttccttcccttcccttctcccctccccttccctttttccctccccttccctttttccctcccctctctcctcccctctcccctcccctcctttctcccccctccccttcccttctcccccctcttctttcctccccttcccttctctccttcccttctccccttccctctccttcccttcttccttttctttcttcccttccctttcccctcccctccccctccccctcccattccccttcccttccctttccttcttccctttcttgacagcgtctcactctgtcacccagtctcagctcattgcaacttctacctcctaggttcaagtgattctcctgcctcagtctcctgagtagctgaaattacaggtgtgcaccaccacgcctggctaatttttgtatttttggtagagacgaggtttcaccatgttggccaggctggtctcaaactcttgacctcaggtgatccgcctgcctcccaaattgctgggattatgggcatgagccatcatgtctggctaggaacctttttctttccctgcagcttgtgctgggataagagaggatgggtggggaaattttatttttatttctactcagcagtgttttgacttgtttttttgagatggagtctcgctctgtcacccaggctggcaccatctcagctcactgcaacttctgcctcccaggttcaagtgattctcttgcctcagcctccagaatagctgggatttcaggtgcccgccaccatgcctggctaatttttaaatttttagtggagacagggtttcaccatgttggtcaggctggtctcaaactcttgacctcaagcaatccacacgcctcggcctcccaaagtgctgagattacaggcgtgagtcaccacacctggccctacttaagtttttatgctgaatttcaattgcacatgatgagatgcccaggcaattcacaatttctggtatatagctccatcatttcacttatcacatagtatggtattattaattttaagaatcaactagctatcaattctcaagctttagtgtgcatcaaaattcttcaaatgcccctctggtccaagtggactcatcccacaggaaagagtacgtacagaaattttcatacagttcctactttctctctgccaggacaagtttctgaggtaattctgatgaagacagcatgagaactgtacttcaatgaactttcacaagggaagggactgggttgtctgttgtatgccttctgtttggtgcaaagtaggtgcttagtaaatacttattgaataaggacagactgaatgaataaatagataacctaagaaaataggctgaatgaagaaatagtaaatcattaagagttttaactaagggtttcaacaaaagtcaacagaatggtctgtagaattttggagaagaaactaaacagactttagttatatggccttttattcctttgggttacacttgaatgatgggaaaacaatggcaggtttaacttggagataaaaatttctcaacatcaaagtttaaaatattaagtaggaagttaaggacaccaatggtgtggagccttcccagttgatactcatgtatgaattatgcaatatgaaactaataaatgatgtacattttacagagtgtgagatggatagctcttaactgttcacatttgagttaaatggtaaatcttagagcatagaaactttgagaaagccactcgtaatctttagttcctaatttattccttgtagaatggggccaacatccctaggttctgtgctgaatgatattcacttgaagttttacaatgcagttgtttgttatttcattaaagtagtgcctattcatagaaaagtcagaaaatatagaagaaagaaataatctttgtgctataattcaaagctaactgccattaatatttgcaggtagtttaagtcagctgtgtattcagtgctttgcatgtacagctgtgcaaggagctgtcaggaatggaaaggcactatcagaagtccgtggtgtcttgcaggggcagaccattatacaagcaactgcaggccttgcagtgaagaccaagtgtgacaagtgctgtaacagagtgtaggtggcagggattaattctagctctgggtatctgggaaggtttcatgagctcagtacatttataccgcacctggagggataagtgggatgatgggaagctgagatggtgtgggagtgagggaggcatttcagatccagggaggcagcctatggtgaaggcaggaaggagatttcatgttcagggcacaggatgtagcttggtgtgacttagcaaagaatgctgaaaagtgaagagtaggagagcatattattggcattattagggactttgaaagattcactgatctagcccctgccagaacagccacaactgattaatattttaaaagtattcaatcttccttggcaattacttgaatactctatcatcctaagagtcaaaagttttcctgggaatttgaatgtaaagagttgtcttcttttttacttttcttttggagaaaaacttgaaccaaaatcatggtgctcttagtaaaattggtattgaatgagaagcatcactacatattggactctctggaaaggtctgttggttgagtaagtgaatgaatgtgtgacaacgaacatttgtactttttgaagtcttgaatcataagttgagcatccaggcagaactgtatgcctcagttactgtggacttgaacttcttgatctctctctgacatctgtcacctccacaggggaagttaatatcgaaaccctctgagtccttagaagggaaaagtgaaattctaacgtgagattctaaatgaatctgctttaaaatgctaaacacatatgtactgaacaaggagatattaacagcctttcattttcaacccctggctttctgtctgcatgaaacacacacaaaagtagtgactggtgactatcataattacatatagtataatttaatccttatggtgatgttcattgacacttcccaagagacccagattacattggttttgttttggccactgttctccatatttgggttggttctgttaccagatcacccactggtctttcattatggttaaaatgcatttgagggatcacaaatagggtgagagtggttgggagcaaactcaaaaaatattaaaatttataattggctataatctagtgaaagtgttggcatttctagtgaaatgattatgctggcttcagttgtaattttgaatgaatctggtgatgataataagaatataaccagaatggtcaatgatcccacgatatatatataacatgtaaagaatatagtttaatggatgtgggctttggagtcaaactgcctatgttcaaatctcagctccacttgttactagatgggaaaccttgggcaaattaccttacctcttggtagcattatctgtaaaatgagaaaagaagtagaatctcataggactgttgtacagagtaaactgatacatgcaaagcactcaggacacggccttacacatggtgcagtgcttgtgtttgctgtagtaactgctaagttgaggagctgaggctccttctgcctcattttttatgcttggctttgtggggtgggtcgctgttactgaagcaaagttgccacctgcctgtgcatccttttcagcctggggaaagatttacaccagtaatccagaagtgcaagtcctgatacctttgctcaaaacctgtcccttggtctgcaggaactctgtggccatgattcccagtagaaatttggttccttgtaatggaaacagtttaaaacaaatgtgtcctcagtctgtccccagttccaagaaggacagacggacacttggttttgtgatctgcctcatttctgccacatttcaaatcattaggatgacttcaaatattcgcccagggccagagtttgcaccttaatatgttttggcaagaaacacttggcatttgagtaatctgtgtaaaagaacatccgtgaggataaacatcttctctaccacacatgaacttagaattctttctctcttaaatttccagtcagacattgctaggggagtaagttgggccagatagccagaagtcagtgttaagctacagcccccttgctctaacctcccttctctgtgtcatttctaagaaattgtaattttttctttccccattggcaactggttagttgtcctgtcctctacctattcactgtctcaagactttttcctgcctttcagatttgacttctagtatgaggagacctacgtggagtgcgtccttttccttaaaactatttttaaattctttcattggctgctgtgctatgacaaaaccattttgtttttttaaattcttgccactaatgatgcccttccctcaagggcatactctgagctctgaggtaatgaatgcttttcaggttgatcatgttcatcccttcaggctgagaacactttccagaaatgcccaagatctaaaggaccttggccagtggaaaaggtaaacttcttgaaatcagtggccaagaataggggcagccacatgctctccccctgggatccccaagatagtgccacaactcggtaccattccaccctccactgcagggagagaggagagaatttgcttcatctgtgcagaattccctccaggatcttattcctcccctttctgcccaccccacctctcaaacagaatgattggtgcttaagtcaaagagggtctctctcaggaatgcatgttaatatcagaaaaggagaggaagtcagcccggcagtgagcaacctttacccttacatgggttcagcctcctcagcctgcccttgtggcatcctgggattttggcagccttatgggtatcagattttcacatggatgaactgtactctacaactacttctgtgtgctaggaaccaaaacgctttctttgacattgaaaatagagttttctccttctcactgttttggcctgctctgttgcaagggagatccatttttcagggccttgagactcttgtttacctcttctcagagctctgtgtctttgaaggctaccaggaggtagtgatgaccttcggataaagcccctggcagctcaggtgggctgggtagggataggtgctttttggttcaatattttcaatttgggagataatccttagactcttagaaagacttccttggctatttctgggcagtaggcttggacatggaggcaggaggttctgcatttctttttcaaagcaaaggtgatggtgccgtctatggaaacaacttttccaaagaggtccttttaatcatgaggcattttgctgtttaccctccagtgtgtgtggggtgggagcagcttgaacttcacacagaagggaacccacagttgtttccacacagctgtttcctgcattgggccagagcaagtctccgtgtcctgaatatctgcgggaaggatcatctgccacataaccatctgcaggcataagtcaagaggaactttcgaggagccttaagattgcaaatgtaggttttgtgtctcagtttaggtgtgccttgatgcatttcctgtctagcatggacattatgagagcagctgcaaaaatccaaacgtgatttttcagaatttgggttgggggaggtaaaaactcaacctgctcagcccagattgattgcaatgctttacataataattaatgatgtacaagctgttgcctaatgggcagttttactgtgtgtgcccttcagttctgactggctggagttctccacgatttaaggcactacccctttcctttatgtgtcttagcctttgggtaaagctgctgtagtcattattatctttctttggtggttatttcttcttcttttttttttttttctttttgtaggtcattcaatgaaacctatagttctcattgggtacataggtctttgcttcttttcttgaccttaacatttaaagagtgaagaatactttttgtatctgaaaatctcaacatctctgagtgctaggcagtgagcagttgccagggataaatgatgaagaaaataattatcacttcctctatggcaggtactatttcaacactccacatatgttaactcatttaattctcttaactctttaaagtaggttccgatgttcctcccatcttacagatgagaaaattgaggcacagagaggttaaataatttatctaaagtcacccaattaattaaggagtaaagctaaaattacggtgaaagctgcacagtgatcctaggagagaggtactattattctcatgttttaatgaggccactgaggttcaggaattgttgaaattcactcaggcttctcttagctccaatgcaagctcttgcccagtatattctactgctgtctttactgtaaaaacacccttatttctatcccttgcagaccctagactccatttagttgagcaagtatttactgaaaaaccactgggttctaggtcttacgccgggcactatgcatgcagggatgattttttaaaaattttatatccttatgtaggtgagtcagatcctgctgactaattgaattaattttccttttgggggagtccagaagtgccttttggtcttgagtaccgtgctggtcacatgaaagctactcaaactagatactaatatctgttggttggtaaaaggtgatacaggtatgtcattgaacaagcaattttgttctacaaatgtttgtattgggttcagttagttccgtgatgggctaatgtcctacactggcctgattgatgaacccaaataaaacttttaataggatgtcaccttttggttttatgactgtcactttcccatttgaggtagtagactaaacagtttaagagcgcaggcattcagctcttacaggattggcttgagaagctaatattatgttgggaaaattatataactagacatcaggacatatggattatagttccagctctgatattcattactaactatgtgaatattgtcatgtcttctgatgcctaatttttctcataggcaaaatgaggaggttagactaagtgatgattaagatcacttataaaatcctagagttcatggaaaacacataccatgactagtcctttcggtcaatttacgagattggttgttgactgtagataaatcccttaattttgttgtctttgtttttcttgcctttcaaatggctttgataattcctggtgcacctaatttatagaaattccgtgaggatttagtgagatattgggaatataagtgctctgaataattaacgcattacatgaacacaagatgatattatttgtactgaaagttaacagaaagatgtcgagtttctcgttacctccttccttccccctcaaaaaaaaaaaaaaaaaaggcttgagttaaaaaggagtttgatcctggtcaggctgtttcctggagtttatggaactccttggaactctacagggtcaataggggctttgtcctgctgtgggtcagtttcccacagttggggtaaggctgccacactttttctcctgacaacactttatcaaacacacccgcctcacaaaatgcagcaattcattagacaaaagtgaggttttgagttacaataacctctgctttgttaaaagccccctcggaatctgagatcttctccgtaggccagcagacgtgcacatgtcccccggtttacaaaggccttataaacttagcctgataagtcatcccccaaattcgtgtgccatgtctgtctctcagtggggatatttttaactcctccttctaactcctctcagttcctttaaggaactgtaatccgaaagggtcaggcacttggcttttacttaggggaaaactttgaaagaatttctgaggctccctctggggtagggctggctttccccaaaagaactggcccttcagagcgtcttttccacataagggcttgtgtgaggcctcaggcaccagttgatggccgtgtcttccccacgacagatggtcaagctttcaatttcagcaagtgatccactgttgagggggcaggcgggggactctgccagcatgccaagtgacaggccagcttagggtaacagggatctggtgtgtgcccggcatagcttttgtgctaacgatgggctgctgacaggcgccctgccccagctcatctttgaggcagaagatcctctgctcccttgattctgtttctccctggcatagctggtgtcctgtttgcctgtctttcaaaattcattttggcaccagatggaccccctcatggtggctagcagttgtctgacttgaagaagccagagggtgtgctgacagctccttctagcacaacctgaatctggctgtcttgtctgggctcaaatggcttaaacacacatgggcagcaaatattaccaaccctggggaagcaagcagggggccctcttaagggagaatggcaatgacgtctacctccataatgttcatgttgctgttgtggaaatcatgatactaataattattcttagtagttcgattaatcttatttactcttattagcaaaattgctgttacagtacgattgctatcaatagtacaattagtattaacatcattactgcactacttctgtcattactaaaactactacatcatggtggttaagagtacagtctctggagctacactgtctgaatttgagttctagattcacacttcctagctttggacaagttatttcacttctctgaatctcagttttctcatctataaaatgggattaatagcagaggttacttaggaggattgtatgagaaaacagatttgttcttagcagtgaactgagcacaaggtaagcacccaatacacggaagccattcttatgatgactgccaccatcagcatacctaccatgtatctgttactctgccttatcgcaattttcacagtttccctatacagtaaggcctgttattgcaccagtttatagataaggaaagtgtggtgcagagaagttcagctccttatccaaagtcacacaggtagtacctgtcagagtcaggatatgaatctcattattctgggtgtttctaatggctgtggcctttcaccatatcacacccactcttgttgtcagtttagtgataatcagccctctcctggggcttgaagtagctttgaaatatgcccttctaactgactgttcttgaaagcagcagccagttttcatgtcttcagtgtctatggatataggattgaaccctagcaagattcaaggatcacaacagtcagctccactgtattaaatggtttctgaaagccatgtgtgatcagcagggctacccagcacttgccttctgggagctcagaccaacaagacagtgcaaaggcacttaggatttgggccactcccttaaccccccttcctttaccaaatctgtcatattgaaagtgggcaagagtcaatgactggctgattgtcctgtgcaaggacagtgtgggtcttggtaccggaaaaggagagctcaaaatcagattttgtttcacacagctgggcttcagtggtgttctgtaagccatttgtcttggacgaaaggttgatcaactttggcttctgtggagagaatctggaagtagcggcaagtgattatttagaggcctgctttcattgatgggcagtcaaatgttgtgtggtgttaaacagtcattttaggacgatgtttgcatttttaaatgttactcttttggttgaaaaggccattgtttgtctctaaagaatgattcccacaacatactcccatcttggcagattctaagagaccaaggagcagagggattcatctgggacttctctcagtttcatattcagaaattggctgaactctgtatgtcttcgtgcagtgctgttgttatagaggatcccagtgttacatgattgacagacattgcagtcagagccaaattcagactgaggcatcatagggtgatagttcttcataatctatttgtgttgagatggggattttactccagtgtggacttgaagtggaagaaaggggaagagaattgaattacaacaagaattcagttgaccagcattttaatgcattttgatatttttaggaaacatttcggcctgaaatccacaggcacatcacatctaggcctagtagtaaaagagattgcaaaacttaggtatctttggaaatacttcttttcccaaacctgggcaggtagaaggtttaattacaggtggtagacatgaatgccccaatatgacacttttagtagctgctgcttttccatgatagactttaacaactgtgatggttacataagaaataactcagaaagttatagggtgaccatataatttatcacccataccaagacatttttgagagttaaagtaggtactattaatatatacaccagtacagctggtataaactgggatttttcttggcaaattgggacctttggtcaccttagcaagtaaaacccatgaatctcactacagaaccaattcagaaaccaaggtggcagtgaggcaggaaaatctttattcaatcacagctagctcttgtctacagcagacagtttaagaaaaacaggagggcctggcgcggtggctcacgcctgtaatcccagcactttgggaggccgaggcgggcggatcacgaggtcaggagatcgagaccatcccggctaaaacggtgaaaccccgtctctactaaaaatacaaaaaattagccgggcgtagtggcgggcgcctgtagtcccagctacttgggaggctgaggcaggagaatggcgtgaacccgggaggcggagcttgcagtgagccgagatcccgccactgcactccagcctgggcgacagagcgagactccgtctcaaaaaaaaaaaaaaaacaaaaaaaaaaaaaaaaaaaaaaaaaaacaggaggtatttgagaagtcaaaggagtttagttagtttgtgaattttacttatttctcatgggtagtactaattaaaacattttacttgagaggctaagataaaaagtggttaccaaatccttgtattcatccagcatgtatttgccagttcatcatctgtgagtttatagggcttaaactgcatgttgtcgttggggaccatgagtaattctcagacaattatatccaattggaacctaacttaaattatgatgaaagctttccctctgtatgagtgaaaatacttccttggggcttaattcttctgtgagatctgttggcagtgccaacagtgtttgtgtcataaggaaggtccagcgtggaaacaaaacaaaggctaaagccacaaatgaaatattggctctaacaccatgctgaatatttcagaaaacatgtaaagagaatcgaatgcacaacccaggggtgacttacctcttttttccctcccgtgtcagaaaccgaaatgctaaccatgatgatttgtttcttcacaggttcttcttgaaatttttcctcaaatgtaaccaaaattgcctaaagaatgcgggaaacccacgtgacatgcggagattccaggtgggtctgacttatctttcttgaatctcaataatggcatgaatatcaggagaggataaaaaagtcttaggcagaagatacgtagctttttttcccagaggtgaagagcagctgaggcccttggtcccccaggtatctgcaatctagcagttgtttagattagagaagagtgggaactgtaccacctgtgctcactggtggaaacaatggtgttctttgagtctagttttggctgcctgagtggactcacttgcctaaacccccacagattaagtaaagtacatagaaatgatgaatcctttgtctaaaattttgtatgtagaaaaccagtaaataagagtaaagaggctgagcgcagtggctcatgcctgtaatcccagcactttgggaggctaaggtaggcagattgtttgagtttaagagttcaagaccagcctggccaacatggtaaaacttcaaccctacagaaaaatacaaaaattagctggatgtggtgaatttgcctgttgtcccagctactcgggaggctaaggtaggaagatcacttgaacccgggagttggaggttgcagctgaggtcatgccactgcactccagcctggataacggagtaagatcctataccccccaccaaaacaaaacaaaaacaaacaaacaaacaaaaaacagtaaagagtacaactggtaaaactgctctgctttacagtaatggctttctcttcctttgcttctctctgctcacctcttccaattttggaaattgttagtggtagctgcctattataaatggccctgttaagaagcataacatctctaaaatgatatggataacaattctgtttcagaaatgtccttaattatacatttactaaaggaagaggactcacaaacaaattcatttacttctaagacacaaaatggtacttggattttagaaaaggttgttgagtctagacgtggtgcttctctgacttaaaagtgctgaaaatcccctgaggatcttattaaaatgttaatagaggtctggggtgggactggaattctgcattcctaacaagctcctgtatgatgccaaggccaccgcccacactttgagttgcaaagttttagacccttgtgctgctctccaccgaatggctaagttatttgtatggtcaatgttagtttccctgtcagagcaacgatccatttatgtatgctcatatggtccatcaaggaaacagcatggtgtttaaagtatgctcttaagtatatttagtcagctttaagtgtagattgaaatgtatgatctctgagagaatcttgaaaaattttagctgcaccttcattctctgatgggaaaaaggaaagatgatcttgagcattgattggagatgtcaatatctcttagtctccaagatgatttcttttaaggaggtgagacttattagtcttattaaagaacaaatgcggtagaaaaaagtaatctctcctgagattctgaggtatttctctaaaatcatcttggcttcaccaccttttggcttgacacacaggaatggggatgtttctttttttcttttctttcgttttttttttttttttgagatggagtcttgctctgttgcccaggctggagtgcagtggcacaatcttggctcactgcaagctctgcctcccgggttcatgccattctcctgcctcagcctctggagtagctgggactacaggcacccaccaccatgcccggctaatttttttgtatttttagtggagacagggtttcactgtgttagccaggatggtcttgatctcctgaccttgtgatctgcttgtctcggcctcccaaagtgctggaattacaggcgtgagccactgcgcctggccaggaatggggaggtttctagtttcttgcaaaatgtttcctccggtcatctgacttcaaacttggtgttctcattcccatagaggattttttgtgttatgtttgagtcaactttgcaattaagctggcaaaaccacacatgtggtgctactaagtgtgtgttgcttagggtcttgcaacatgaggctgaattttggaataaactgttttgtagcttgctttggtcttgacatgaaccttatatttcttttgaccaaagcttgagttaggagcaaagtatagctgggcgtgaaacagtgtatgtctaataaacatgtctaatgcctaatgtataccaggattaactctgctgtacctcttagggcagcagagtttgggatggactttgatgacactgggaacctaaaagagcatccgtgtagaacttccaggggctctcttttctttgtggaacctactagtaaaatgtctgaaaaggttgaattatagaaatatacctgttatacaagatgagaaaccaatttagtctattatttttgagaacatctacaaagcttctattttgcaaacaaaatagttattctttgtttagtagaaaggctgctgagatgaggaggcacaacatagatatctggaaagtcttataatcctttggagcttcagtttcctcaactgtaaaatggaggaaaattgacacttctgcttatatcactacatatgaaagaaagcaatattttgcatgtatagctaatttgtaagtgataaaatacaaatgcaagcctttggagaaaatccatgtgacaaactgaagatggatcatgagttcagtctagggtttctcaacctgggcacagttaacattttagactggataatcctttttagggtcaatcatggggggtgcccccatgcattgtaggatgtttagcagtgtcactggcctctaccctccagatgctagtagagaacatctacctcccaatcatgacacccaaaaatgtctgcagacattatcaaatgtcccctggtggagagaggagaggcaaaatggcccctgactgagaactactgattagtcctatatctgataaccgctgacaagctcttactggtgacagtgccactgtcccaaaaattgcacactttgattaagtgtgagagctgcccagcacaaagtccatactgtctttcaaataaatatgatttatctgaactctgacactgacaatgctcttgcctgtgattctcaaatgggtcctaaaatagatcaataggggcagctaccttggccaccatagagtcagtttttgagttaaggatgagccgtgtcttcctttattaacaatgacaaattccttattgggtctcaggtttaacctgctttgttcccatcacccactctttgctgcctagaagaggatggaggaacccatggcagaatgaacactgtcacattttattttttatccctgtacattaatacatttctttattattttcatacaaccaacattgggtttcatgcatgcaggtgcatggatatttgtgtaattagaggatggatgaattgcctcgagagttaaagcaaaacctcaaatctctctaacccaaccttttattttttcttcttcagtctttttctctttcatgactatttactcctacctctctctgtattatttcatgctggcagacattacaccctttttgaatccatttttttttcttgaattatataacaacagtcactcattctgaactccctacaagggatgctgtttgtttgtcttctgtaaatattgtttttttccaggtctccttctgaagtccagatctttccccattttataggctctctccagtatcttctccagtcacagcatcttaaccactatttatgcactgagaactctggtatcagaatctctgagacctgacacccaggtttagatctaactgtccagatgtctgctggatatttccaggaacttcaactcagtcagccccaaactgaactcactgtcatcctcaggtgtttttctgtttgttcgttttgcctccaccccaagcttcttaggttctctgtcttggttcattcctaactgcattaaatgctgggaagataactgtgtctatattcagcatgttccatgttcacgtgtataaatgcatgtgtccatgtgtttacctttatgtgcttctatcgatattggtagcgatgatgatgataaagctaacatttatttggtgcttctttagtgagagacattgtgcaaagtattttacatgagttatcatgtttatcttcaaaatacccttattaagaatatggaaatgtggattattcccatttttaaaatgaggaaacattttagaacagttaagcaatttacccaaagtcacacatcaactaaatggtaaggcagtggtataatccaagcagtctgactcagatattttctgatgttttggaacaacaacaaaaaaaaattgtccatagtctgtgagcagatatttagtgaggctataaagagatctcgtaacatctgagagccctaatgaccccccacaaatatgtgctggaatcccaggaaagcctgagaggggtcttcaaaagagatatttgtcctagcagagcctaaaggtgccatctgcatgaagaacattgacacacaatcaaagttcatcatgcagagggtagagttgtgtggaagtgaggaaacatgaacatttttccagagtacagctacagtgttgatcaatttttacttgcagggactttagaaaaacaagctattatttagcaggtaacctgaacttcacttaacctgtaaagggtttggtcaattctccaaggcaagagagctcctcacctagatggggcatgagtaaatcaccccgaagacatctcagagtagtctgctaagaaatcctactaaatttcccaagtcttaggaccgaaccaagacagggaggattagtctttgctgtagctgtcctggctacagaggtgtgtgtcataatgatattggttgaagattgcttatgagtaagacctatactttttagcatttttctcatagcacactaattgggaggctggtttcaaatatttttatgtctctgttgcctctgagggtgagtgaaagagtgtctttctggcacaaaaaaactctggtctcctccttacatgtcaatgtggcttttaccagttttattgaaaacctgagtcctggcacatctgactgaagacaccctctcttgcctactaagcagggtctgtgcagtggtcactgccgctgctttcctccatctcactttgtatgcttgccggccagcctgatcttcatatagcaacgcaggagcgtgtctcctctgaacagcaatcaggggcctgtgtaggtgactgaggaggacataagaaaggttgttgatctcttgacatggaaagacattctgtcaagcaaactcagcttcacagtggctgggcttctgctgtgtaaacagagattgcttaattacacaggtcgtgtcaattagtgtgaccttagtgttttcaagaaattaatcactttctgcagagctgggctgtgttcatactttaaggcagtatggaataaaccttgtagaaaatctggcacaatgtttttttttttttaatttacaatggatgctttcttttgaaatccctaggctgtagttagggtaagaaatttgcttaaatacaacagtggatacaggctttgttaaggactggtgggtatgaggaaggctggaggaaagagaaggggagcaagctggggatggaaatagctcacgacacagggagaaattcacttatgactaaacaatcctatttcttcgtcttgacactaaaaagatgctaatgtcaaaggactatgttaaaaccatgcttcggtctgatttttaaccgacaggagccagacaattcaaccttaagatttaaatttttatcaatagctttccttttggggactggcagaatgagggtggtaagggaagaacaagaatcaggttcaagctgtcattgcaatagataccataatacctggagactgaagtaaagtataaatttccaaattcatcttatctcttcaataaagtttttccattggctataaatctatattcacgtataaatattagatctataactatatatgaatgtaaatagaagacatagttatgcacacatgcaggaatgcgtgcattcagtaatatttattgaagtgctaagtggtgagtctatcatgatgaataagaaagataaggtctttgccctaatgaaacttatattcttcttgggatgatactagctcttgtaacaaatagaacatataatatcgaatggctcacctgcagcagaaggttatttcttgctcacataatggtacaaggcaggtgttcctggttgacgagcaggtgttgtccttgaggttatttggggacctggactccttttattttatgcctctcctattctacagaaccctgctgtctttatccagtcctctgatgggagaaggacacatgaagggtgccatgtgctttttaaaagccttggcttacaaatttgctcacttccattggctagaagtcagtcacatggtcatatgcaatcatagggaggcttgcatggtctagctgtgcagcccatgaagacaagaaaatggatgtatgtagaataattgccattagctgcaatgaagatgtgtacaaattaacaattacaaatattagaaattgtaactgctgctataaagaaaattaaacaggttattatgagagagaaaaacagtgtggggtgggagatgaaaacctctctttttttctttttttttttttttgagatggagtctggctctgttgccaggctggagtgtggtggtgccatcttggctcactgcaacctctgggttcaagcgattctcctgcctcagccttcagagtagctgggactacagtcacgcaccaccacccctggctaatttttagattttttttttagtagagaagggagacaacctctcttaaagtaggtgaccaggaaagcgttctgaggtgaggacactcaagttcagagatcaagaataaggataaaccatcctgggaagagccagagagggttctgagcaaagggaatagcaaacacaaaactcatgtttacctcatgtttatctaaggaggcaaacaatcttgcctcacatcttagtcatttggatagtaaagaagaggagaaaccactgggttattcatcccaaattcccaccaaaaatgtgttttgctttttaaaatgatgacatgagttatgacattaaaaggcaactccctgccttttcaagtaaattctagaaattttggagaatctttgctgtttgcttaacaagccatggtatctctggatccgtatgttttagggaatgattagaggattcttaaaatacatgcctgacatctgcagtttctgtctgctttaaatacacttacataaaagggataagaatatgtgcttctttatttctcctccaccgactcccagcccctgtcttggatgtacttatattgttatattgttttgacaaatagcacatcttgcaattaaattctctaccaacagaatgctaggggcccgagctgcgatcactctcttcatacagaataatttcaagaggctccatgctgattaattatactgaaagcagctctaatgatagtttcagaatacaggattaagtcacataacatggtaaatacaaatggtgattttcaacctgatatattaaaccattatggcttattgggcaaatatgtatcttggcatgagccttatgctgagccttggcagaaagtgtgcatcactgagaaggaatctttatgaacagcatttgatgagtggtcgccctgcacttagagaacatgtatttctacattaaacacagctgcttttaaaggaaatgtaaaatacattaaaggatgaatgtaaaagtgtttggtttgatcagtgattaccaatggatgctggctctgaagatgcctatagttgttgggatttaccagcaaaaggtatccttatattcttccactttttaagttgtaacttgtagagctctagttatatgtcagacaacatactaagtgttatacatgtataatcttacttatttttctaccactttttctcttatttgctttagtcctgtcaagcacattggccttccttcatttttcttccccacatacaccaaactcattcctgcctcaggatctttgcactttctattctgtctccctggaaaactcttctgacacattgaatgactggatattttttattcagatttcaggctgagcacggtggctcatacctgtaagtcgagcactttgggagtacgaggcaggtggatcacttgaggccaggagtttgagaccagcctggccaacatggcgaaaccccatttcttctaaaaatacaaaaaataaaatttcctctttttttgtcacttccttaaagaagcctttcctaatcacccaattaaaaatatctcccacctaggaatcatctaggtggaagatattttattttttcttagaacttatcacaatctgaaatttgcttttattgcttacttattgtctgactctctctctgtccccagtaagaactaaactcctgcttggtaaatgctttatcggttttgttcattgttgcttcttcagtgcatagaataatgtttggcacatggtaggcacatagtgggctcaccacgtattcctatgactaagtgactcatctaagattacaagcaagtaagtgatgggactggggatcaaattcaggatcatctgactctggaatctgagccattgaccaatatgccattttcttgctcctgatttccatgtccgtatgccatagccccatcgttacagagcacacatgacaatcctgtttgtctcattcctacctaaaatggccaatgaggacacacacacagagagcaccagctaaacaccaatgacaccctcaagagtagtcaaaagtatcctgatccacagagggaggaatgaggttcagatgacttgtgagcttttcatgtttatcatatgtcaccgttcaggagacagaagctaattctagtttccaaaggtctagattagcttagcacatgtatctgaggatttagaagtgtctgttcttgtcttcctgttaagagctggttttgcctcaagccttaaagtgcgaatgtaattccattaaccactcctttactccagcagttccactccatgacatcctgtaggttcacgcgtcctccataatttttaatgagttatttggaatctttcaaccagatagaagctagcaatcaggaacatttctgagaatatcgcattcatatcagccaaggatattttaaaggacaaagttaatgaagacctaactgctgcaaactatttttatgtaaataatactcaaactgtagtcggtcacacaggcaccatagatttgtactggaagtattaggagagtccagagagaggatgtaagccaggactgtgtactgaaaggccagaggccaactgtgttggcttacacctgtaatcccagcacttttgggaggccgagatggacggatcacgagctcaagagatcgagaccatcctagccaacatggtgaaacaccgtctctactaaaaatataaaaattagctgggtgtggtggtgtgcccctctagtcccagctagtcaggaggctgaggcaggagaattacttgaatctgggtggcagaggttgctgtgagccgagattacgccctgcagtccggcctggtgacagagcaagactccatctcaaaaaaaaaatgaaaggccagaactgagggtgggtgagaactgcactgtgagtctacaggtttcccttcaggcttgcctctgctcttaatttgtcctatgatcttgaagttgtttttttaaactcctgggccttagttttccaagctgtaaaaggaggtgttggacaaatctggactgccataacttatattgaggactccttttatcattttctcctatgaacctcctatgatgacatatttttcaatcaaattgcatttattaagaatcacgttctctttagagttctttaaagccatgtaaaactgctagttgagagcttctcatgtagatgagataaccagagtttccacatggagttgatagggtcccagacaagggaaagttaactgaatatttcagtatgcagccttactgtggatgcttttatgattccctctgtgcaataatgtcacccattattacagtcaaaaactcttagttaggagccactagattagctgatctctggagtctcttgtgactctaacatttgacgagtctgcaaagtagttcagctgacaggtagaatgtagaatgtagactatagggggttgagggtagaagtgtgatcaataccttttaaaaaatatagagagtttattttgtagagcagttttaggtttacagaaatataataccttctcaaccccatccccatcccctaacccccagtttcccctattattaacatcttgcattagtgtgatacatgttacaattgatgtgccaatattaatatgttattaaaatccatagttttgtgggccgggtgtggtggctcatgactataatcccagcactttgggagactgacatgggtagatcacatgagcccaggagtttgagaccagtctgggcaacatggtgaaaccctgttttcacaaaaaaaatacaaaaaaaaaaaaaaggctgagtgtggtggtgcatgcctctagttccagctactcaggagctgaggtgggaggaccagttgagcccgggacgcagaggttgcagtaagctgagatcacaccactgccctccagtctgggtgacagagcaggaccctgtctcaaaaatcaacatcaatttaaagtttacactagagttcactgtttgtgtgtacattctataggtttagacaaaagcatggacatatacatcattacagtattatacagaatggtttcactgctctaaaaatcccctatccttcacccattcctccctctcttctcccagactcctggcaaccactgatcttttcactgtcttcatagttttgccttttccagaatatcgtatagttggaatcatacagtatatagactcttgagattcactttttcttatttagtaatatgcatttaagacccctctatgactgtctgtggcttgatagctcattttcttaaattgcaaaatgatattctattatatggattaccagtttgtttttccattcatccattgaaggacatcttggttgccaatgccttttatttagttgagatttttattcacataattttaggtttacatgcagttatagaagtaatacagaatgatcccatgtacccattacccagtcttcctcagtaacattttgcaaagttattttacaatatgacaaccagaatatggacattcatgtaatctaccatcttattcaggtttcccttgttttactagtacttgtttgtgtgggtgtatttttagttctataaaattgtatcatgtgtctagctttgtctaacaccacagtccttatatagggaattttcatcaccacaaggatccctcatcttgtccttttttagtaatcatactcaccttctctgtgtgtccaaatttcctcctgtgaggattggattagagacctctctaatggcctcattttaaagtaatcaaagccctatctgaaaatacagtcacattctaaggtactggagatcaggccttcaatgcatgaatttctgggggaggaacaattcagcccttaacatgcagtatgtatcccctggttactggctttttaccctcaacataattccctgggatatcaatagtttgttcctttttattgctgagtattattccatgaaatgctgcccagtgcttttcatttagtgtacttcaagttaatatttttaaagctttgtgattaggggccctaaattaatgcaaaagtacaacaagcaaaaaacagagaggttaggaagcatagaacagactaactttaacactgatttccttttactgagttaccatgtatcagcactgaaaaccaagatttggaatttttaaataatcattcaaaattaacgtgaggaagagtttattttttggaaggaaatacttaactgtcacaatattctaaatttaaattacaaaaatatatttatggtctaatctttgctctgattctgtgtttgttggagaaatgcttaaagatacaaatttcaacatgttgggttgcttttgtcataaccccttcttccccacaaactgctacttttgttaatgtgatcttccactcatgattgaatttagctgcttgtgtctttttgaaaatctgctcatgagacagaggttatgcttcatgaatcttagataatagagttaggacatacaaggtctcctgcctgacatgaagggaagaggggctgcctgagaagtgatggtgaggaagtactcaccaataacaaaactcctgagaaatcctcattgatgggaaatattgggaaaactagactgaactgatgagacatctcatttacagactattttcagaatagtaaggtttcatttagttataataaagcctcaaatgtaagaggctaagatacagatagggtctagaaagcgacattatataaaccaatgaaaaccgcaattcatgcaaggcctaaatgtgtaataatgtgttactagcacaaaggtctttaaaattgtacgtttgtgttgagcagtggacatagaagaaacactttctgtatccttttatttaaaattacagtgtatgctgggtcttctttacggtcattaagatacttcaggttatcaacccgacacattcttttgaacttcttgtttaacatcacccacaaattgacaactactactctattactgctactaatgtttattgagtgctccatgtgaaccaggaaccatgctggccactttaattaatttaagcctcacagttaccttatgagttaagtatggtggttattcccattgagagtcagggacactgggactcagagaagttaacctggccaaagtcacatcaaccaggaaagcttgagagccaaggatgaaattttgtgtctagttctttcaaattctaaatagagggggattggaataataccttttagggatatctatccagaaaaggatataacagaggagattctgaaccactgatatgagccaagaaattgaaaacatcagtgtaaaatatccaaagtccatgggtagctagaaacttcttttttgcccttctcgttctcttataacgaatactctcaactagaaaggaaggcccagatgaaaagtaccctggaacatgctgagtgttaatcagcatatctctagattgccacattaagaagcaaagccccctaatagaaatttcattccaaaaatatagtgattaaagcatatatgtataaatctaaacctgtttacataggctgatatttatttcaggagatataacttggacatcttcaagaatcaagtgcacaatttatttcaaaaccattctagagcagtgccatcctatagaacattctgcaatgataaaaaaattccctgttcaccgtgtccaatgcagtaggcaatagtcgcctatggctatgaaacgctcagtgtggctattgaggctcagaaagggaatctaaaatgtcgtttagtttaaatttaaatagccaggcatttggcttctgtattggacagtgcagttctagaaagtaaaggtgtaattataacagatatcgtgaaattctaaacatatcttttccttcgtattctcatcatctgtttctctgggcaggggagtggaaaaggggagaaagaaggaaagtgttgttgtgtccaaaggtaaaatcatttttaatgtttatctgtctcaaatttaggctgtgttttattgacaaaatttaggaaggttgaagatttggcaggcttgtctgtccccttgcctgtgtgaatgtgtcagcaccttattaattatgtggtaaactgtaaaggcccttttccctcctaccatgggcctatttttaaaggacacttcagtaccccttttgcatctcacagtgtttttttttttttaatttacaagtcgctctgtggattaattttagcatatgttttatttaaatatatcctgaatatttccaaattgaaatgggagaaattgttttgtggtagggaagttgtgctgtgagtttttgaggaacgtattagctgcttattttctagaaattaaaagtataaagattctctgtattatcttttttccaattttgattggcatttcagccaaatgattctatcacacatgtggccctggtggttcttctcttgccaagaaaagaaaaacatatggggtgtagtttttttttccttaaccgtttttgacatttttgttcaatgtaggattagatgacagtgtctttgaaacatactgaatattttaagccttaagtttgtagagcttgtgtcttacaggtgcatggtgaattgtcattgttttttttttttcctcctaagacagacatctagaataaccactttctgtatttcctgacactgaaaacagatatggtttgggattccttttatagtttcttcagctaacgactccagtgaccgctcaattgtggtctcatagtaaatcaaaatttctttgaaagacccagctctgttatgtaattgtaagtcctaagaagtcgtctctctaaaaagaaaagtgaatttctgttgccttaaataatattgactttgccactgcatatgatagtttttgaaggcaaaatagtagaccgttttcttctcttcttctttcttttaaattaacctgtaaacatacaagctgtgtttacacataaggctgtgtcagatctggttggtcaatcatgaataaagagaagaaccactctgcaaacttctgcatcaaacttacatgtcatcccccaaatgatttgttctagatggaatttggggtttcacagtggctaaggagaatactctgattccctgattgaactctcaactgtttcctatgcattttaattaagtagatttagaaaacaaaatcaaccttatgctactagtatgggtgatgtgttcatagcctgcaattcgtgggcatctttgaggctctgggaaaggaaattcatcgtattttgccaggatgcacttaggtcaacgaggaggacagtggaacttttaagtatgggaagactgtggggactggcgtccaagctgacaattcacaggcataggccagggcctggcgttttcccctctgcccagcttagctgatgaaagagtgttacacaagactcttcagaagtcgatgcccccttcagccaacttggagaaaaggcttcctcagaaactgaggcctccatctgtgccaacccttgtaaagcggttcacctcttcagaggctaatgcctctcaaaaccaagaacaattaaagcgagagtctttccaagcaactggggaattgagcaaaataaatcagaaatcctcagccttcgctctggaggctcgcctcattatgagagcagatctattagccctcttgccattgtctttcatttctcaagtgaggtgattctaattaaattaatctgcatgtcaatctatcggtgatcaatcaaagagcctgaggtttcccctatgctgcagggtgcttgcggctgacaggggctgataatggaggaagaaataaactgtcgagcaaagttaattagtcaacataataggtggattaaacgggagcgggctgattgctgtttcccatgtcaaagcatgaggtgggagctgaagctgcaattacagacaattattatatttggttgtaagaggtcgcatgaataaacatatctctgtgggtttcagttttaatccctttccccatttaatataaggagaagcgtaggtcatttcttctcattgttttagtcaaagttctctgagacaacatctttgcctgtgtctcttctggcaaactgggttcacagtcactttatgagatggtttcagtgtctaaattatgtcttgggccattcccaccagttttttttttaatttgaaacagatctaagacccttaattagcaggaattttttggggtggggtgatggtaatagtagtgagggggactttggtctgatgaaccaaactaatgtggaaagaaaaacgtacaagaaatctcaaaaagacatccaggagagaaaaatgcatccctgctcttactgaaatctttttcatttctctatcctcttaaccctgacacagtggggagaaatattttaaagattcaaaagatttttatttgcatgatcaactgtgatatatgcttcagtgtctaaactgaagggtaatttaggtgaaacacaaccacccttgtgtaaaaaaatatgctaataaagatcctcttgttaaaattatggttaacagtgtaccttctgctgtataactataaactgtgcaattttacttaaaactgcatcaaaagcgttccatgccaaagacccactcatcaatagctcctcttgttagacttgtacagcataagcaccagttattatgtgaaatagctatgcaattttcttcagctcccagctgttatttatttaacttgagtttattacccaccacgcttttatattaaaatgttcattcatttctttcttatgtctccaggtcgtggtgtctacgacagtcaatgtggatggccatgtcctggcagtctctgataacatgtttgtccataataattccaagcatgggcggagggctcggaggcttgacccctcggaaggtacgccctcttatctggaacatggtaggcgaatcattttcattggttggcattgctactttaactgtgaatatatttggtttctttcttccactccaccacatgttctattctgtttcaaatttcaaaagtctttttgaataagattggtcctctagggttttttctcttcaacatatggtggcaaatatttaaagacaggaaaatatctctgaggcccacctttcttgtgggaccactctctactctggaaatggctgatattgcctcctttcaggttgagagaaagaaggaggcctggaccattgctttattctaagctcccactggattacaaaataaggaaaggccaatccaagggaaaaataaggaaaggccacacaatttggtatcactaaaattgtgatatatttgacatgtttataattgaccattgaggttttataatgaacccatcctctttaccaccctcctggtgtatctctgtgaccacctgttgaacttcatttggagatcaggttcaatgtcgaggttggaggtgctttctgaatatgaagcccagaccaaatgtccctcctgtgccctgtacctaactcttacctcttcaccatgtgatagaacttgctgtctgtaagtagactttggtagggagaaatcccatttgtcttgagaattatggctaatcagtggtgcctttgagaggactgaaggaaaccagataaaaatttgaatcaaggaaagtgaatgccactcagaagaaccatgggttgggttaggggcacgcctgaatttttcagtgctgcatgtgtgtgtgtaatatatccactcttcctcctctccactcatccatccatccgttcatctatctatccatctatccatctatccatccatccatccatccatccatccatccatccatccatccatccgtccatccgtccatccaagaatgagtgactgaggctctgctggataccagtcaccatattagactttcttcaattgcctcaaactctcaacccatttccctcacttccctttccagtttgctagggtcagcaagattcttttcagaacactaccacacaaatgatcacctgattgcctgcttttttccatgggccaggagttgcccataatttacaaggtagaaaactcccttctctgccagcatcccaatttaataaacacgccactctcatcatttttgcctggctttttcccctgtgcttatggaacacacgaactgtactttttattaattagccagatgtaatgctcttagaagggattcttcaccacatccagttttacagtctttttaaagtaaaccatcatctttcaaaagctgcttctttatggtttcattagtgctgagatggatggatattacattttgcaggaggccatttcaaacacctgctcatgattacattcctagttccatttctgtacttaaaattattctgatcctcactttacagtaatgttgtctttataatacccttggagtcacttaaggcattgtgtgactagaggtgtttaggtgaaaggaggaagaaaaaattagggaaatactcagtgggcatgatttggagagtgctgcttaaggattgaagttatgtttttgactgtgggtggttagttgcaataggtactgcccagtctggtgacagacttgactgtcagtttgaaatctgggttcacactttcaaaatatgctcaggccacacccagctcctatttctgctcttgggaagccagtgagaaagctcctgacaccaggcaaattatccctccaacaaaaaccaaaagcaaacatagaatatagccttctctaaaggatccctctaggcaatgaggatcagtaacgttattttgcagcatgataaaggactaggtcttgaaataggtaccaggaaccccaaattcaatttagtttcactctggcctctatttgaccttggacaaatcgctttagcttttgggatccttgatttcctccttgttaaaatgaaggtgatgatctgtaggagagtttaaaaaaaaatctgtgctttgggtgggggcaggtaatgtagatagggaagtgggctgggtggaggctgagaagacaggcaagtacacgctctggtgcccctcggccccagccagttgttgctaaggggaatgagagcccaagtggggccagatgttccagtttggcaacagtgaatttttaattgttggtaactaattacaaaatttttggacactgaagggaggagagggggaaaaaagccacttaggaagaatgcagccacaggtcaacagtttgagacctctggatcaacacagctctaagcttcctcccagctcagatattccctcttctaagagtgttaatatttcagttggggtgtcatattattctaagttttaaagtcagcattttattcacctgcttcagtttatgagtccacagatggccatattactatatttttcaaaaaatggtgacatttcactgtgtaagtggttggccatccttggggacataggtatgtcctatttccttcagcaaggggctttgccttcaccgaagccttatttcacttctctccagtggaaagaaagggtagacatgttcaaattcttagtaatgacaatagcatagaaatctgcttctctgcagagtgagtcaaccaaccacacaaaaccacccactcatttagacacttcaggctgacacataaatatctactcagcaaaggatgactattgaactctttcattggtaatgtgtgggagtggacctagatgctaattcatgttgatgtgagggtaatactttattttgctgttgaaaagtcctatttcaaaatgctctgtttaaaagactttgagaatcatacaccctcatccctctgtgtctccgctcccaccccccaccgccttcaaacagctaccgcatggtgagacggcaaagcatgttctcctcttgtgacctgtgggaacctacgttctcccccattctggactttttaccatctaatttacaggtagcctgaattattttgggctattctgcaaatctctatttatatcctgcttgtcagactgttggaggaagtttccttttgtggctcacctttctgtgtataagtagagacagagatcgtgctttacattcatgcatgggctttcttatgtgacccatggactcgcaaacccctgtgctctgataaatgaccctgtaattcaagtatgagagttgacaaaggcaaatttatttcatagactcttgcatggtccaaagatagtgaatcctggcatgctatagatcgtggaaaatggtcttcccccgtactttctcttcattcataaataccaagattttctttggctggatatttatgggaccatttagcctagtgaggtttcttctttaagcaatagctttatggaagatgtacagtcgtggagacaggcagcctcaaaatgtaactgctctctcagttccaatttttgaaaaagcatgagctcgggatgaaaggagctgagtggctgccacaaggctatgttcagcgctaccctgtgtacttgccttgtcttccagtcatttgggcaagttcatgaagactgtgttctggggagtcattgaggggcctgaggagtgttgctattggcattgttgttcccctgagttccaggttgtgtttacttgaattcaaggccaactgtggcatcagtttctctgtttcttccccctgtggcaaaatgcggtgccctcacaacactgtggtgcagagcccctgtcagcttgcatgcgctaacactttattatctaatgatctaatatgcaacaaggcaaagtgcccgtgctcatcattctgacatagaatgccgggagaagtgactaaattactttatgtaccattagcgcttgcagctatggtgaactcacaggcagcatttatgcaaatgcctgtgaatacactctagtggctttgtcaggaaaccatctgacaagcagtttaaatgctcatttttttaaaggggatatatgtatttttttattttggtgtgcatgtgtttttctcctttcctctcttctttttctttcccttctcccctttttgggcttttggaggacttgcctcctccatggtgactagagaaatgtgagcacgttctagagctcacccaccagtaggagccatttccaggagtgggattaagtccccagtagggtattctttagatctagttttttttttttttgttattgttttgaatatgtgcatccttcatatttatttggaaaaaaaaacaatggaactattagtcaagagtttttagaatataaacatgttagtgttcatgagctctgacctggggtcctacttatttttttagattgaagatagattctttaaaacatactcagtttttaaaaatggaaaatgattgaaatttagcttttgtgggcatcagatacaaatcaattaaatttcccttcaaagttataataaagactgcaacataaaacataaatgtgccaagatttcaagataaataaaaacaatagtggagtttggtcacactcaaagtattttgaagaataaatactgatgatagactcactgggcccatctcctggctgtaattatagctttggagaaatagagtcaggtgttcaccaccaccagtgaattctgaccttttggttgcagtgtcacattacaactgtccctgacaatatggtggtgttcttgatctttagcatatgaccttctataatccttttgatccagacagaggcagtttttgcttctgtcagttgcccctgggtgtccagcaccattgacttcctgtgaccagctgcatttaaatgtgtttttcatttgtttggtttttttgtttgtttgttttcatgtttttacggaaatgtggagaaagatggtttgagcttggagagactacctcaaattgagcctgtctcttttcccttctgtataatatggtcctaacaagaggatagaaggaggatcaggctctctggctgaagtggccctgggaaggtcactttgcttctgtgggcctcagttttgtatgtccagtgagagccaggtggggtcctctctaggcttccttttagcatgtactattttatggtgctctgaactaaagctattggcacatgactttctgcaggaggtgactttggagaaatagagcttcctgggaacagagaaatccactggcattttctaatagaacccttcctctggatctccagccaagggataaggtgtcaataaggtggacttgaaatcgctcattcatactaagcaggcactacatgccagacattaagctaggtgcagtaggataatgcagactcagtccttgtcttcacagaatatatgatgtgaatagagaggagaggtactaagcaaaattagagtggtgcatcaaagggggaccacaaaagcagaggagagtaatgaagtgtcagggaagccttgtttcaggaaatctcatttatgccaaaaccgaagagatgagtaggtttttactaggtgtcttagtctgttttctgttgctttaacagactgggtaatttttgaggaaaaggagtttatgtcttacggttctggaggctgggaagtccaagggcatgatgccagcactggtgagggcttccaggctgcatcatcctattgtggaaaggtgaaaaggcaagcaagtgtgggtgaagagagctcacttttataactaacccactcccacaataatggaattagtttgttcaggaaggtagagcccccatgacctaatcacttcttaaaggtcctacctcgtaatactgttgaaactgcaattacatttcaacatgaattttagtagggacattgaaccattcatctattcaaaccatagcactaggcaaaggggacaaaaaaaaaaattgccaggtataggaaactgtgtgcaagggttgttttgcttaggtgaattccaggaacaaaaggagactgagagggctcctgttgcgcccaggcaagggaggagtggcaggagatgagactagggtggctgtgagggctacatcatgcaggccaaagtgggctggtcaggccatggtcttggtggcaattgcgaagtggggaggaggtcaagcagggctttgatgaactcagtttcaattacatgggctcctcagatccggtgaaagcccagggcaagtttgctcagacctacttataactttgctcttcgctgctggactttggaaactcaccagggagttggctgtgctttggagctgtccccctaattactccttattgtatcaatagggcatgtgttcttcatagaaagtcaaacattttaagagtcctttctcctctttttttttcagatggcttcgtattattgatttagtttttcgtaagtggcttagaaagagtgtaccttttggcatctttttaaatttgtggagaccctcaccttttcatggtctttagagtagaggactgctgcattatttgacccattaaaatgtatattaccccaccaaaacttagtgagtgaaaataaactaaaacaacagagaaaaatataccctcccaaatttctctctcccctcccaccaggggcaatgcctgagccacagctcacactgagtgaagtcagtgaaggatggaaggtcatttctttcactcttcctcattttacagagacccagagaggggatataatctgctcaagcttaaacatagcttgtttctctcaaaatccattcagcactctttgtacttgtccatgtgcatttcagggtttgcatagtttcctggtcactggataaacatgccagaggatttggggtccaccccaatgcctatccatttcatattggcctagccttgcctccagtctttctgggattcccaggatgctgagaagaatgtctgtaaaataaatccagcttcctgacagaaatgtacattcaagggcagatgatggatgatgcatagcttcccacatagccaacagcccttctgtggctagttttgatgcagaatcccagccaagcccactaaggcaagatcatcttggtgaagggcccaggctaagtagaaaaatattggtgtcatcttttgtgactgagggtggcatgttacaatttaccaattgatttccctatttgagaaaagaagacaggtgtaagagcaaaacattagggctaagaatatccagctgtgtcataaaatagagcactgagaccccagattttcaggtatcaaatcagggcttttactttgtgcagttgagaagatgccttttgtctttccttgaaatagaaaggatgtggtaagtggtcaagataatgcacaacgatgtgagtgaagactgatttccagtgtattccctgagtaattcataaagcaggtaacaccggaaatcctaacactggggatatggtagccagcaggatctcagcatcagacagactgaagggttcatgagcaggtgatctatgttctgctcatttgaccatggcaccaccaatagcactgataacaaatgagaaatagtgctcagacttttttgccatacttgacagtaaccaggccaggtaataatatttattactctattattatttactaccactattgttgtttttttaaactattagcatttatggatcatttactatatatgccagcaccatgctaactattttacttatcatctcatcaagtcttccaacaaatctcatgatatataataattattatcaccattttacagatgagaaaactgaggtttagaaagaatcaataacttactcaaagctgcagaactaattagaattggacctggaatttgaccttaggtctgcctaataacagtgctaagaataataacaataaacattccctgagccctactatgacaggcacagagtgctataagtaccctgttgtaaagaggagaaaaccaaggctaaagagagggtcaataactagcctaaagtcacacagcaattaagtagtagacccagggttcaaatccaggaagcttgatgctgaagtctgcactctaatctactgctctgttacattacagtatgagaaattccttccatctcctatcctattgttcttatttttttcttaacacaagcaaggcaattgtgctggtatcttcaacagacttttcaaaagttagcccagagcatatctttttaaaaaatggggcacatcatgtatatttactttatagttgattttccttcagaaacctgaaggaaatttttcccatggctgggacacattctgctagttgaattttaaaaaatgctgattttattcgatgactagtatattttctgtggggctggcaagataataaggatgctggtaatattttatttatttgcaagaatgtcctaactcatctccctagaaatcatttgttgaccatatgggctctctggcacgtgtacaaggtgtggaggaaggagtccatgagaaaatgatgagatgatgagttaaacaaccgttaggatactgaagagtttgtaaacctcatgctagaaataacatgggaaaccgatttggatatagggaggctagtttcttatatgaatttcttgacaaacctgtaaactgtgggaaatttccagtatttggttggttgagctaataaatgagtgagtcacaccttactaattttaataagcacaaagtgtggtgtgttgtgtgttgtaggggagatttggggaggaaagattgttgctttctacttatattttggccagaaatgacaggactttatgtaaaaactttttttttaatgagacagggccttgctctgttgcccaggctatgaagtgcagtggtgcaatcatagctcactttagcctcaaactcctgcactcaagctatcctctcacctcagcttcccaagtagctgggactacaggtgcactccatcacatcaggctaattattttgattttgtagagacagggttcctatgttgctcaggctggtcttcaatgcccgggcttaagcaattacatccccttggtctcccaaagtgctggcattacaggtatgagccagcctggtcagaacttttttaagcctaattttttttgtcttatatttggttacaaaagcatcataattccaattgcattgatttgcctaattgattgtttcaaaccaagctgtctctatacttatctgtcacaggagctcccctcacttgagaatttcagaggcttcaaatgatgtttatgggcaagtggaagctttgatgtgctgttcataaacccttcttaagatgagatatttagaagcagtggccaggggttgattttgaaatatttttgtttgaccattttcagttatatgtgcagaaataaattaaaaccaagctctgccactaccttactacatgactttgagtatgtactttgatttctctgggcctctgtttcctcatcaattaaggtgggtcttggaagagcccttcaagctctgatgatttgttttttgaacccagctaattctgtgagaggttcttttatgtcttgaggggctacacacctgcagccttggaaaagtggctaccaaaatgcccaggtgaaaggatccaatttccctccaccttggccatctctgcaggaggttaacagttggttctaggaggcctggaaaagccatagaaatgtggcatacatagccattgtgccttaggtagctctcaccctgcattcttctccctggatttcttcagctgggaaggtgttgtgtacaagcggcttgatagtttgcagtgagctttcagaccactatttcccatgcagtaggtgagataattttagaaaatggaggataaacatttaaacatttttaatggttgtgtgtttatgttaatgcgtaaacaaaacaataactccaacttcaaaatcatgatctcacagctattattgcttagggcaagactaaagttaaagaaaaagttgatctaaacaaacatagcagctaaatactattaagtaaataatagtgtaagtggtacagggatagaggaaaatcaggactgaagtttgggaaatgctgttagagagggctgtaagggttgggggaagtaataattctttcaagtcaccaggaaacagtgtaggaccctgggaaacattctttttttgagtcaaatcatttttaaaagaaagtcctttaggctcagtttactgttagaatagacttaaatatcctaacaggattttaaaaaataaaactcccaagctgctgtttttttatttttaaacaagtagggtctgcatgtcagagagcagaaattagtttggaaagaggacttgcatcaggagagaaaatcagccagggtccacccaggcagcgcattatgataatacatacggaaccagctggacactgagcaaggctgacattgtgttgtcaagggcaggatcgcccatcaatttctgagatagaatttgagttcagatgacagaaagagcagcaactgtgttgaaactgatgcatgggggaggggcaggcaggcaggaaccaccgggtctaaaggcaggaagtcctggtacctccggaagggggtggctctgttttctcatctggctgctacccttccttctaaccttaacatctgtcagcaagatccacctgggtccttgcatgattagagcccactaaagggggagcttactggtgctaattttaacccccaagagaatagagtgcctgctgctgaaatgggggctaggtcgacccaggaaatgggactccacgtagccaccagttgtcaacctaagaagcccattgtgggtgtagtggcaattgttaataacttttggaagaattcttaacttttcagctactctgtttagttccttaacatcttaataacaccagtgattcctctttagttcatttgcttattcattcaatcattcatctatttaacactaacacatgtttattgactgactgccaattatatcagacaatagggctacagaggtgataaggcagggacagttgttagcattatgacgtagactgtcacatgagtgtaagtatttatgtgccgatattagacaaataatggcacacggaatgatttaaactgcaatgatggttaagtgctataaggtacaaatacagactcctaagagagcttagaactgggggactcagccaagtctgaagaatcagggaaacttttaaaattttcaatgagaatgaacaggagaggggaacacatattcaaaattccacgtggggataaaacattagaagctgtagggagggcaaatagggaaggtaggttaggtctgagatccatttttgagaaactaaacttggaaaatttccataggttgtttactctttgactttgagatgtggttccattgcagtttcttaatcatgagctaacagaactcagtgtccataaaatggtagcatttagagcagtgttttgggtgatcatggccttactgttacgatagcggttgttaagtactttctctgcatcaagttcagtgctgagcactttgtatgatctcttttaatgctcttaacagccatgggagggcactagtattattagttttactaaacacatttgggaaactgaggccatcctttaaggatttggtcgtggccaaagttaggtttttatctgcagcttttgaatctccaagtagttgacacaggggtcctcaccactgttttttcttattgtttagtcagtgctaacctcccctccacattggacttcagacgtggagagaaattctcctgctatttgagcatgtaatataatacttgcttcaattgaaacaaattgacgacattactcaaaggcaaattgaaaagccagatctatgctaaatcccaagggtaagttagttggcatgtgcagtgatatatgggaaggtgcttttctgggttaagataaaaagtcctggtatcacgtcacactatcaggcaccccatctcaaactccctgtgccagccctgcaacttgaaatactcagtggacagaaatgatactttatagaaattaggtggtcatcattgttatcagatgaatatgatgccatcagcatgattttagcatcctcaaaaaaaagagatttacctggagggacacaagagaaaatctgaagcatggattgcaggattgtggcttttctgccggcctgccgtgggcaagtcggctgggagatgacctagtaattaaaatcctgcttaaacgtatgctgctggtcagttataacagaagcactaacatgggcaaccagagaaagataagaaaagcgaaacacaaaagtaacactcttgagcccacagggtgcagaaatagatctgaatggactgagtgcatatctgaacgctaagcatgaaagcagaacccaagtactaatatatttttatcccaatctgtgaaattaatcaatattttatatgcgaacatatgctcctgtgttgctggcttatttaattgacagttgcaatcagcaggataccagttgttcaaacccacatttttcatccacagttctggggagaaatgcagcaggggacccagggaacagggacacagacagtgtcagatttgaggcctcttctcaacccttcagtttctttcatcgtccttggggcaaagtaataaaaatttcaagatagtgcaaatgttgaatatgaacagagagcaatgtacttgggctactatttagaagaatgataattaaaatgaacgtagttggtacaaattgagatctttaattcttcattgttttttatctgtttctcttttgaacatagctggagaagccaacagatactgagcacctactatgtgctgggcctgaggcaaatgctgttgggtgtattatccgtgggctggtgggtgagggggatatatcccagccagttccaatgtattggatcatttcttgatagaggaagaaaatatatctttggtctttctttgccaaaatcttctggcggaatcatcaaaccagctgtgcttttccagtaactattatgtgcaacaaatctataaagtcaaacctcatattcctctacctttcaactttggcagaatcctagaaactctccttgatttggttagctaaaggcctgtggaatccaatctttgctgtttaaaagaaaaagagagttgggggaaagtgttattaaggtactattttagaatagtctatttgttagtaaattgttattattttcatgatacgtgcaacattctatagtgaagaccattggaatggacaatgtccagattaaaaatgaaagttaaaaggaactgcctgatactttaaaaatgtttctcatagtgttgctatcgtttgtgttagatgttcagactcagtgtgtgtttagcagcccaacatgtaacaacagaaaagcttctaagcctggaagtttggcagtattttcaatgttcctgtatttaaattggcacctgtgctattatattaggatgccattttctgaacttggaaatagaagaaggtggagagagattttactgtaattcatatgtgggtctgagtcttagggggaaaataactttacttggaaatagagtagtaatattctgtaaagttaataaatatccaccctctatcttggggataagaaattgcacaacttaagattttatgggactttggctgtatttgtatgattgaagtgaatattttagccaaactgaacagaaatttcagataaacaccaaagttgaagcgtagtttgggtgttttaaacatttgactatatcaatcaacatggattctcaaagtctcaagtccagttgaatccctgagattcagctatgtcatttgtaaagtggaatgaggaacatggtctgtttgcctactgctcaaggttgatataaagaataattaagataatgtatggtaaaaccctttaaaaacttaacaatgctagttaattgtcaggtatgggttgagtgcagagtactgtctacccagtttgtaaatgaatgaggtccctgtctgcaagggatgcgttgactagttggggtgatttgcctatgtatatacatgcccagctataaacacatgcatatatcaagatgagttcaaggaaaagtgcagtaaataataaatgggaaagataggaagagttcactaaagggttagtgttttgtagactgggatagaaagagacaccttcatgcaaaagatggatctttttggcaagtaactgtttgggtgatggaagtaagtggtatatctttcataaaaaaatatgctgggaacatgcaaaggatgtttggagacagtggatttgggaagctggtcattaccatctttcttttcttcttccctattttccttctccttctcctacagcaacttctcttcttcctcctcctcttcgtcatcatctcacaatttttgcccactctgtactgaactcttcacatagattaactcattcaaaccttacaacaatcctatgaggtgggctgtcttataattattgtcctcaattaaagtggtagaaactgaggatttcaaaaagtgaagtaatttgcccaagctggtaaatggtgaagctgaaatgtgggctagctgaggccccctgaatccagagctggtgctcttaactgctgctgaggctgaaaatgaggctagaaagggagaatgggccagactcatgagggtggacttgatcccgctggctaagttttgaaagctggtatttgaggaaggttaatctgggttttgataggtagactggactttgcatataactaataattatgtagtagaaatgaatcacaaacaggcaagtgcgagtatttgctctttgatgtccagacagaacagcccagaccccaaagagtaatttttgaggaagttgagtcagtacatcatagagttgagatgaaagtggacttcccattctttgcatggcttatgtgggcaaagtcaatgatacatattcctgtgcttatgacatcacagatcatcaccacggaaacatctgtgctgtaacaaacgctggattgcagtgtcactaaatgtgtcagggaggagaggaaactggctcaaaatgataaggctctgaataatgaaagttcactgaaatatgttagcaatggcagcctcggttgtggagagaaatataagcagaactattccgaaaagcacaaagcaggacttgtgcattattaaaggttgggcaaggttggtttcaaaatgctgctcacattcaaaacatggttttcttaaaaagtcactatctatgctgtcttgcatgacaataaaaatccttcaggaacaggagctcatctctcaaactgcgtatagaaaatcttctgcatagcaaagaaaggccaactgggggacttccgtgtgttttgggagaagacgtaaagatcaggagcagaattggccatgattatgtttattgtttggtaagtcagtgacagtattagttcaatgattgcagaaattaataatcagtaaaagatgactctgagccctctgaggatttatataagttgcacagtggtagatcatgaactgaatccagccttcagccatatttatgtttgggttgcatggcaccttcagaaattatgtattagttgctggcaattgaagatagagagattatatgaaaacctggatttactaatgtcttttataatcagaagagctggtagtgctggatccacattctcaaatggcaacgggtagggaaaactcagaaatcatcttccttttggatgaagcacatactctacatttagccacaatccccaccaatcccattgcatctcctcatcccatttcattgacttaccttcctgcctagccctgtgagcatttgattttgtgctcctcattggagggattggagattaatcgttgttcctagcacagttcctagtctatggagggcaccccctatattgtagctctgattagtctttatcagttataggctgagttatgaaaacttgatcctgagatcagcggtatccaattgaacttcctgtgatgatggaagtgtcctatctctgtgctgtccaatatgatagctactagccactataactattgactacttgaaatgtggctggtatgactgaggaaataatttgtatttcatattaattaattgaaaattaaatgtaaatagctgcgtgtagctagtggctactgtaatgggcaaagcaaaagcagattgagtaatgggatcaaacatccagtcagctgtcctcatttaggatagaatgtggaagatagacagtagggttgtgtgtgtgaacttgcccatcttacaagagatgacttataataggcttcatcacctaggggcatctacttccaaagtgggaaccactacctggctagaattgttgtcaatttcaggagcctaagacatgtgttttacaaaatgtttatgtgcacattcatagcaataagtgtaagtcatcttaagcttaaataggaagtctgactgttctctgtcccctaaatgttcagttaagggtactacttaagtataataactgtacttgtgagtggaaaagcctacattatttgatgagctgcttgactcccacattcacgacagcatagagccaagagccagggtgagtgagggtactgtgagaaggaagcctgtggaatcctgctagactgctggagggatcctctcttcttagggccaagggcacacaggctgccatctcttgagatttccatcgtgaacacactgagcacatctaatgatcatgttgctataaaccagctcacaagtaggattctaaaagatccctctctcatgcaactttttctttcgttcgcaccttgtttgcctgggaaacttgtcactggccctctccaccgtgcctggtagtcagagccctccatttgtctttgtcatagagttgaaacccagagccatctaccaagctctggcttaatggcaacccactggcctttttcctgaaacctgcctgccataagccaacttttccagttgatcaataaatgacttcactgcttctagggatatatacatggaggacaaaacagatgtctgcttttttcactccagtttaagctcaaattatagcttctgctcccacacccatacccctgccccagcaaaaaaaaacatgcctccttaaaacatagaaatcttaatgaaaatgatagaaacagtgttgtagctaattttgttaagtgatgactattaccgatcctcttgtaatagaaaaaaaaagaagaaaacacatgtgactatcttctgcttggatcattcatccaattggaattatacatcatctaatcttacagtcaaattctgctaagaggataccatatcttttttatctttgtgggcaaacatcaacgtaaactcctattacaatagtgaattgaatgattcctagaattcaataggaagagaaagacaaaaccctctaacaaaaaagtagattctacatgttttaaaatttcttcttagcaaaattcatagcaaaaacatttcctagaaaaagaccaaggtaatatgaactgagagtaactaatgaaatgctaaattatctgcacgcatctatgtttttattgctgaatttggtcctgcctccagacataaggaggctaaaaattcatattcagataaggaaaggcaaaccttggcgaacagatggagcagagttcagcataaaggtttaatcctatcaggccgattcctgtatggccatctggataatccggcacacacattcaaggcctgttaaaaatacgactccagccaagattagcgtcacagattttccactagacttgctcatatttggctttatgattttccaggcccaggaagactgcttgtgaataaagacttaaatagtccttgaagaagcagttgcatatttttttaacctgaaaattgtttccccttttcacaatattgggtgtccatttttggaaggttattttcatttccttttttccccttggctttcatttcccaaacttttcttacaacaggacaataaggagaattggactaaaaataattttgtgcataaaagttctccttgtcaggatgaagagagttatttacttattgtataatcagaggcacgtgaatgtactattgttgcaacaaatatcacaattggatccatgaataattcattttgaaaattctcttaccctccatgacaatttttccccattgctttgcaatggagtgactgacagtcatagaataagaggtgggaaagaaacccaaagaactgatgacaatatttgcctttggctgctctaggattaatattttgtacattttaattttggatttggcagatcaaacatgaggtggaaaacagtgtagtcacaccttgagttataaaattctgagctgcagtgtagttaacaaacaatttttgcatattatgaaacaatgctatgttgtgtgtcattaaatcaaaaagccttcaacaagtctttcaagtgcaatttagaagttacaggtacatcaaaatgtcaagatttcttactgctaaattgtcaaataaccccgtgtaatgaacctgcacacagttccagatctccgacagacaaactcaggaatccaaaagcgcttgccctggaatgttttggattacagttgttgcaccagcatttttgtccttcccttgctcaggtgctatgtccattgattgttgaaaaattttgctaattcagaataaaataagaaagctgcaaaataggaagagaatataatttgggcttagtctataattagcaaatggcataaattggaacttagacactattttgctaagtttaggtacatctagatattcaccactaagctaacactgccttaatgtagatggacattggagctacatttccaaatagtgcctgtgaatttttccttttcttcttttctgcgagagccattaatgctgtcaaagcaaagggcattcttgccaaatgaagtcactttggaataaaggatgaaaatcacttgaaattctcaatctcctcatttaatatttaataggtttaattgcatctagtatggagagatctctgtatcatgggttacatttctccttaaagtgacaaacatcacacacacacacacacacacacacacacacagacacacacacgactctttttcatatataatacatgaatctttgccaagtattatctagatatgctagtggacaggacaataaatgcagacaaataacaaaatgaaataaaaaccctaataaacaataaaatgcttaactgcataatgcaattactgaagaaaataaagtaaggcagaaacaaatccctagtaacacaagttaaagcaacagcataagtgttataaaggctgctacaccttgcatgaggaaactgtcaaatttgtttgtttgtttattggctgagtttatttgtttatttggagttagcattctgaaagtgaagtttgcatactctggtaccatggttcaggtcaggcattctaattgcttctggtttctaaagcatccagttggagaatggataaacaaagaatagatttgcctcctgtgcatggtgaaaatacagaggtccagtcttccagctggaagaaaaccttctgtttgtcctcttgcctgtccagtagctgctagtttcaggatcaaagaaggcaggttgtagtgctaaggagctgtgagcaggaaggtcatcattcactgaaaaaaaaaaaaaaaaaacaccagcaaaaacaagcattcagatcgagcaggaggaagagatatctgtgcgctgagtccaagtggaatattttgtgccctcaatagtctctccgtttctcccaagtacaacatcaccaaaattaaggagataaaagggagaaaagcatgagttttacgaggtcacaagtatcccgtagaaatgagctgagctcatgggttttatgttttctgccaagtctcaaaaatttgggacaataacattaaagtcgattcctcatttctgaaaagtttcccattaatattcattccaggcaaatgagatccttaaaaaaacattctactttggagggactgttgccagttccacctactcagtacatttagttggatatgttagcaagcagctgaactgggagttcttaggaaagtcttacaataaaatacataatctgaactgatgagagtatagggtattctcgtaaataaactctagttaatggggagctgatggtaattattatagcagcaactagcatactatgtggtgcatagtaaagcaacaaaacacaagtaggcattttctgtgtattttgctggaactctgtgaggtgagtgcccttatggaaactacaacttaaagaaggtaagagactgtttcaaggttgcactaggtgctagatgtggaatttgaacaactggagctcttgcccattttcaaatacagtcatactccaaatgttaaaatcaacttaacataatttcatatttctgtctttactcagaagccagtaaaggctagtgccagtattttcacctccactgtaagcatcagtggtctgctttgtagaaatgctcactaatagagagttctggttaatagaattctggaaaaggagagtgtgcacgttttcctacaccatatgtaatgggaatggaaaagaaccttatatcaccttgagatttagatttagatttagattagaaaatttctaaatttgtacattttatcaactcacagagtgttgtttctccagtgtatttagatacaggaatggagaaaaaagccaaacaatatatctctaattaggctttcataatgtcacatcgattgtcacaaatgcctcattttggggataagatatgataaatgctgaacctgggtcatctatatggctaccccaaacaagtgaggtattgatcacagcacagagagatttcagaaggaaaaataagagcagccctagggccctgctgatagctgcacacaccactaattcacctcaatgggcaggcacctctgagctcaattaacccttattcccaaggctacccataaaacccgaggtaaacatggctctcctggcccttgctttctatcaaagaaatagatcatttctattggaggctgaagtgcgattccagcttataaattcaccttgctaataaagagactgatgctcccagtgcgagtgtgcaggcacttgaatcatgtaacacttattctgtaaatcagaaaattttaaactaccgagggcatctctgatttcttctgccttctgtggctgttcgaaggaaatataaatgctcgggagatagagtaggtgatagcaaatgtcccctggtgcagttgtctgcacacagaacattagttgttaaatacgtactggagctgaacgatttctttctttcttttttttttttttttaattcttccctctcttttccttctcaccatgaccattgttcaagaagcaaattggaaatctggtaattaggccctgactcacggtgtagtattagagtcctgagccaaagttcaacaccctgaaatgaaatttaaaccaattaatctgttagatttttatcgcttgtccgtgttttctcagcaattcccccagcacgtggcctttgatcaactctcatacaaacgctaaaatgtgtgcctgctgctagcaagatgggaatgacattaacatggtactcataaaacaatcagagcagagaagccctcaaacaggcagggcatagtaatatttaataaaagcacacacataatcttcagaattagcattttgtgccttgcagtacctttgggagaagagcttttatttgtggagtgatcattattataacaaagaagagctacctaataatttccattttaactctgcaatgtgccatgagcatttcagagccattatgctaaactgtggtagggtaatcatgttattgtcatagtttgaaggaaggaaaatctcctctactttcgtggctggtgaggggtgggggaagggatttaaaaaaagaggcaaaccccaccccctaaccctaaacttttatttttaatgagatttaaaaccagaaattgggtcactggccttgcggatacttatgagtgtgaaaattcattggagaggaagaaagaatcttgtattaattaaatcaaaaatttgctggtaaaagtggttttgtattcaaacaccgcccccacattccataatatttgcttggagatagacttgtattgattatcacatccctgtgctgaattgaactctttcataaatcttttcacagtcaaattccactgaatccatccactgtgactattaaaagtgatttttccctgtctcccctctgtttctctctgggtatcccaaatgtaagaaacaagtccttggctgctttgcatgttgtctgagctttctcagagaaaacatatccaaaatgaggagagaaggggaggctcagggtcagcgcagctgttttgtttgttttattttccttttttaaaatgtaattttgctctaaaaagtacaactgtttgctctcatagaattaaatgttctgctgctacttaattttttaaattattattacatagtaccttatttgtacacattgaaaaaatttaaatcatacaaatatatagggaataaatgttaatagtcctccttttctgtcaaccccagtctagttctttttataaggacctgctggggacagttatacatatccttccttccaggcctttgtccatcatacttgttcacatataactgcatgcatactcatactggttcatatacaggttcatatatatcatttaaaaatcaacttaattacactgtcctttagtttgcaaattgtttttttcacctgctaacctattttgaaatctttccatatcagtttatagaattgttttgtgtattttaatgacactcctagtattctatcgtgtgaatataccataatttctttaaccaccccctactgggagcacctagacatctgaattttttgctgtcaataccgcaatgaacatttgggtacctatagttttagccacaattgcaagtatttccaggtcttcttttagcctggcagttgtgttgtgagtagggttaaaatgtaaaatagcagcctgtgagttaaagccagcccacaaacattttgtttggcctacgcattaaaaaaatactgaattcgtttccaacattgaaagattgaaaaatttgacataaaaatgtggcttcctggcttctttggaaagatcaccagaaacccagacgatgctaggcctgcatttttatggggtcaccaaaggctgaagctgagcagtgctgtcacctttccctggggcacgtgcaattcaccagcaccttcccgttgcattacagatgttgagaaacagtggccattaatctcatgcttgttctgagatcctgagctgctgcattcgtttgtatgtcttgccttggtctacatgggtctgtgaattcttaacaatagctcttgggcctgattctcttttgctggtcacagggttttctacattgcattattgacatgttggggttcttcatttatggggactatcccatgcattcatgcattgttggatacttagcattctttaatttaatttaattaattaatttatttatttattttaagagacagagtctcactctgtctggagtacagtggtgcagtcatagctcactgcagccttgaactcctgggctcaagcaatccttctgcctcagcctccccagtagctagtatgacaggcttgcacctggctagtttttaaaaaacctttcaagagacagagtcttactgtgttgcctgggccagtcttgaactcttgaccacaagagatcctttcaccttggcttcccaaagtgctgggtttacaggtgtgagccactatacccagtttgacctccagttactaaatactactagcttcccctcctcatcctctctctctgggatagctcatgattcctttacatatttttgaaatttgtcagtggggaggtgtcacagagcttcccctcaagactaatatgttataacagatgtataggaggagctttggaacccttagaggtctaaacttagaaaggtctgaatgacttacctgctctaagaatggcatatagtctcgaagcagggatggtggatggtgctgagtgtagaggtaggagggactgaggggtgtgtcattcttcctggggtacttcctttaaggctttatttctctaaaactaagacaatggtgtcaaatattgtttcctcacctggttatctctggaagcttgatgctctttcttgcctctgaggcattgacatatagctttgcttctggaaaattgctcacagtatttgaaaacattgcaactttccttgggaagtgtttgaaagcacatacacacgcatgcatgtacacccacgtgacttctgtatcctacgtataacaagtgggaaaaaagagggaaggggtcaagttcaaaaccagcaggtcttggccatgctattttaaggcctttcctgtaggagggtttctcaaagacacagaaacacccccttccacctccctttgtgcaatgatgagaaagcctgcaggagaccgtatttagctaaagaaatatgtgtgtgtgattaaaaaaataaaaattaacagaaattccaaagctaaaactgataataaacacaaagaccattttgtgatctgtgtgggtaatctcagggtcagcaattaatgaccccattggattccacagtttgactcagtcaggactctcaagaccaattcagttaaaccaataacctgttcttctcagaagtactagggatatcataacaccttttgtactccattctagcaactaagtagactgagttataaattaagaattgatatttggggacattaacaaaatgtttccaaactgcatatatttttagaactttatgtagttgttaaatatagtttatttctcttataacttgcttcaaatcatacatcatatggtaccactggtttgggagtacttaatcatgcatttaaacattttttacttttaaaggtcacttttgtttaagaaaaagccctatagttgtggaacactgatcacaacctctatgtatgttaaaaaatcagacaagaaatgtcaagtcacgaatcatttacatcttcttgattaattattttgtttttgggagaaagtagagaagagaaaagtcatctgaactgcccagttttagttgtaaatgcattgctatgagttcagccaacatgaaatgtttagtttggatatttccaaatttctctgtgcaaatttttaagattaatttgaatcaaaatcaaacccattctatttgtttgtgtggtggcacgtgagcaatggtcccaccgggctggacttaatattttctttccttcttgcaaaagttaaagcatgacattttgccaaatttgacaaagtccaaatatttttttgccagttttttcccgttaaaattaactagtgctctcattggcttcaatgctcagaaagtcagtcttggatacttaataaactttttattaaagatgagggtcccattttctctccttgaacaatatctccctttaggatgttgctttcttgttgttcataaaaataatcatgagaacagaagcatgacactgtagagttaaaaaccctcagtggcacgaaggtgcaccctgagagattttaaaaacaatccaagaattacatttatgcccagcaattctgttgaaagtatgccatgctcattaaacaaaccacctccagtctatttggaatcacagtatttgcaaattatttcccatctccaagggccatttataatggaaagaaaagagatatgaaattttgaaaaagtcaattctagggttttatgcctgggaaagacagcaaagcaaaggtcatggaaaactctgtggttgagccctgactcagctatttggttacataattcaccccgagtgacctgcattcttcacatctgtaaaatgggatctatgacatttatttgaaaaaaaatcgtaatgatttttaatgagacatgttgcaatgttagtgtttcagacagaaggcatggagcaagaatcatttcccgctccaggctcctctctttcttagtttcctattggatggtaatgtttatctaaaaaaacgtaagttttcttttcaggagatatatttaactatgaagcaattctgtaaggtttccaatatattccagaaagtcacccatatttaataagaaaaaaatccttagcatttcacaaattaaaatttgctttgtgttttatttcataaagtttcaggtttgataaagatttgggtaaaatatatgtatcttaatagaaacaatgaaaagaatgcttttaaaaactgaagttgcaccctgaagtttcaggtcctaatgtggctgggaaatgctgagatcttgagggactttctgttagtgaaaagataaaagattttttttttcctttttctcaagtcttcatcattaaagtttggttctaacagcagactccttctctttttcatgtgtgttgaaaagcagctactccctgtatcaaagccatcagcccgagtgaaggatggacgacgggaggtgcgactgtgatcatcataggggacaatttctttgatgggttacaggtcatattcggtaccatgctggtctggagtgaggtaggtgttgtctgaacattaatatctaatagcttgatctagttgaagatactgtctatacttgaatttctaatagaatgtgtagactctagtggtgccgctctgggtgggccagcttcagtctacagaatttggggaaactagaagagttggtttgggtttaccaggaggcaacagttactactggaatgacttcctttctttggcccataagcaatgggagagcttctgttttgcagtttgtcttcttgggcttgccatggtgtggaggtcctattgtatgttgggaattgaagaggagatgcaaagtcacaagatgtatagaaaaagcccattcaagttttagcaagggtgtaatctgtgactattttgcagaaagagtctacggtagcctgatcttcaaggaacatcattcaatggcagcataatccaggtgtaggtggttcttgacttatttggtgactattcatcagacagagtgatttgctgggagaacctagaaccacaaagggctttttctagctctaggaatttacagctctcaagcatctcagtgtgtgactgcaaccccatgaaaatgactatgttctaattgtgcagtactgtccaagcactgtgattgttcttttaacctaccagttgacttgtctggcaaccatcagcatcagctcaagattacaaaacatgcatcccgttatatagatgccgtggcaaatctgccattgtgttctcagttctgagccccagtttcttagccagcatgctccgagcactctctctttcacttcactaaagtttagaataaaaacaatgttagggttacaaggtaccatagggttcattcaccccatttgctttgtaagcatgtagtcatcctaacttactgagacttaccatatgctaggcaatgtgctaaaccttgaggtagatcatctcacccttctttctacactacgaggtagatactcgtagcatatttcttttcttgataaggatagtgaagctccaagacaaatagttacatagccagagagcagctgcccaaagcctatagaatgtaagtgatttgtatatggccacacaaagatttccatttctagctgtgctcccgtgacactggtttagcctatttctttgtgttgttttctctctagaggggccatgcagatgagcagaaagttaagactgtgatacttgggtatgtttgtctttccagaacagacgctgttctttgtaagccttctgtgtatactgcttactgccagtaacccactcaggcaggccccttgctagcttgtgctgctgctgccttggtattttctactcagcaaacaaggggtatgcatttggtcgtagaatcaaagttctcataaagccaaatcagagatgagcttcccagcccactcaactaatttttaggcaagatggaacatttcaggtatgaaaggtggagtaacttccccttgccaactgtactctatgttttgttgaaactattgggttgtaaattagaagcatcaaattcatggcatgttttgctgccagcctgctgtcttcctcctgctggagacagcagtcctcatgaggacagactgtcccaggtcttgtgggctgtatcttctaccttttccatctttctttctgttgcttatcaaggaagttgagagatgggaagagtaaatataatacggactccttgtttcatgtcattgtagtcaaagtggagctcaaaattggcattaaaaattactgaccctttgagaaggaggtgggttagtctgaagcttcctgtaaaaccttgtgccttcttaacccaagtggactccattgaatatggaataaggacacatcaggaaatcatgcatttgcacctctgccttacgcttaatcaaggtccctccattttttctcactttcctactttcttgacctgttttgggaacagcaaagggaggttagcatgtaacttggatttatccaaattgctttaaaggatctgtttctatataacaaaattgatgaaagtcataggaaggaaaacccattaatgtaatatctttgtcctcctccctcctctgtccctccagtgccactgccttgtgtgtgccaggagcccctcttcactctgtcccaggggtcagggtgggtccagccaggagctgagggtggaggatgcatgctccttcattgtccagcccctgctttcgtgctgctcttggttgtagctatgtcataaatcaactatgaccctgtcctggtgcaaactgtttcccaaaatatttgtgcagatcttcttttaaaacaagcaaatccaactgcattagcagttgggtacctggatgtaggactttaaattgggctgttatcatcatgattgtcctgatgttcagaagaatgatccttgtagaagtgaacccttttttgtaatattctaaactatttctatatttaggttttcgtacaggctacttggcacacacaattttctctgccttttcatgcagggagagaatttgatactgccccaaataaagaaatccattgtataatggtgggaatggagaaatagctcagacttgctaagggttcatcatgtgtaggcactttatgggtattactttaagcctcacaataggcttgtatgcaatactcctgttattctaattttacatatgagtaaactgagtttcagagaggttaaaaagcttgcccaaggttacacagccagataggactagagactggatttgaactataccatattttttttataaaggaaggaaaagtcctagttaataagagagcacatgcaatcttgagagagggaagaatgacagaaagaggaaagaaagaaaaaaaatgaggtttcataagccaggtggtatagtagtagaaagtagtaatagtaattgtagtagtgatgatggttgtttttaatcgaataaaattacatgagtgccttttatttttgtagaagcagaaaaatattaaccaagtttgaggccatttgtcaaggcttgcattgtacagaatcagaatttgatcagaagacatctaagaaaaagctacagaaaatgcagagtgtgactaatattagctaacattcattcactgagcacttagttcctgccaggcaatatgataaatgtttggtagtgctcttgtgggattctcaccactgcgtatgatgttgttctcattttactgatgaggaaattgaagcttggggaagttaaataagtaagtggttcagttgccaagtggtagagagatgggacttgaacccaaacagtccaaccccagggcttaccttcttaactttcataatttagcctgtgccaccatttttatcatagggtgttatcagatcagggtgataggctcacattgccatgatgtcttgtgctgggggtgccttaacagttgctgttaccttccaaggtcaggtagaattggcatgtacagactcagagaggtaagagggcttcccttcatcttccagttgtatatgtttgtgatcggcaccactggattctaggtagaatttatctttatgaagtaaaggatacatgcctacgctagggcaagacagttcacctgtttagcctcatctctagagctggatccctgtccatccaaagtctttgccccagaccacatgatcttgaggtttgtgccatgtctaagatccaggccttctaattttaagtagacttttatcacttctgcatttccttactctatacccaacacacccaggaagcaggctggcaggctaggacaagtggataacattttagattagcagctaatgccattatttagagtctttttttagctaaagaattttttaaagagccagagaaaatcaggctggcttaacagactctaatctgtgctctttccctaccaatccaatcttctgccaatgagtagttcagtttagctcatggatcaccccctgaggggtgggaagaagaaaggggcactttattgctcctaactcagctctgccttctgcgagctcccaagttcacatggcgttcttgtgaatttgatttgcccccttcctctttctttattgtttcttgcgatttctcctctccctctttttagaaagtaaattattttactcttattcttgtgctccttgccctgtcctactctaaaagtcttttaaaaaattgttttagtattttatatacaaatctaggaaaactagcagggttgatgtgtgatgtttaatgtggggtgagattatttttcttgaccagagccgcacttggttgttttgcttttctaccaacatgtgatttggagcagggaggggctcctgcttctggtgtgcagaactaattgttagtttaatatctcctctgaattcctccaatttctaaagagtgagcactggttggcttgcctgctgggtgtctagcactgggataggtaccatgggtaattaaagttgggctttgtgggatctggtgttttatttggaaagacaacttgcttccatgcagcaaattagagagttacataatatatttatataatctagtattaaattggtagtttacaattcacgctaagttctggaaagcagagagagtggtgtagtcagaagtagatggtttgaatgaccaatcaagttcctcttacatatggatgtagctctgtgttaggtatgttaggctctcatgacccttttattttatcacagaatttatacaatttagagtatttaagctgtcaattaaaaaaaaaagtacaatggtgggtttcgtggggagcagagaataatattccaggctgcaagggttgagattgcatggggtagcagtggataaggaaccaattgagagacttgggtattgattgtccttccattgcccaatcagaggatatagatttagtcattgttggtcgctggacctcagtttctcatctgaaaatgaaagacttagtctatatcctctttgaaatcagtgctacaattctagcaattcctttttttttttttttttttgagatggaatcttgctctgttgctcaggctggagtgcagtggcatggtctcagcccactgcaacctccacttcccaggttcaagcgattctcctgcctcagcctcccaagtagctgggactacaggtgcgtgccaccacacccagctaatctttgtatttttagtagagacggggttttgccgtgttggccaggctggtctcaaactcctgacatcgtgatctgcccgcctcagcctcccgaagtgcttggattacaggcatgagtgactgcacccagcctagtgattccttttagagtttattcccctgagaatcctcccacagtcagaaggggacagtggtggcaggtggaaactgctccttttcttccactattgttcttttctttcagagcacacttgcaatacacagatgtgatgttgatttgcaaaagaattatttaaacttcatcaaaacaatttaattggccacaaaactgcatctccctattgataggtctttagtcaatatttttactctctatgcttcagattctggtatctgatataaatctgagacttacgccacagtgttggcctaattcgtcttctagataatgttatggaagactagttcttcaggatattaatagatacccattgggagatgagagagggaggtttttcctggtaagtttgggaaatgctgagtcaaattctgctggtctttcttctagggctttgcacaacgtttgaggtactagcatgcaccgcaaatacttagatgcagtattcagcatgtcccaaacttttgtgaaggcagaactcttttttttttccccaaggatcaccttacagggagatatattggtgatggctgaagtgcattttgatttcatgttaatggagccaagtcatgaaattcaatcacaaagtggttggactgggatagatgtgagaaaaccatcttaaatatttgcagaatatcattcagattagaccaggaatgtttagagccattattctccaatgctgcaaggctttgaacaaaatttccctcatattttgcatctggttttagtcagtacacacttggcattagatgctatatgattttgtagggcagctatatttaaagattgccagtaccacttagctcagatggatgaagccaaagtttcctcgtgtgtgaagcaattagtctcacacaggttctcctcgttgtctttatccagatgcatgctttcttcagctacattcccagacacggggcatgaagtcaaaagaaacctctgggggagacctgtgagtgaatatagttgggtaaatggtggtttaggggctcagaagcaattttgccacttaaatcaaaaaattggaaaaccaagtggtaaatgcagtccttcatttctttctttcttcctatctatctctactttccattctcctttgtacacatagctcagaggaatgattgtcaataaacaagaggattggcttccctatgatattcaagagtggttgactaagatgcatacaggtattccaccggaagtttcccaggcctttttgcccggccttgactcttactgaaccacatgtagagtcaccacattttaagggccttgagaaaccttttttcagtcaagtatagtttcttattttgtgaggaaaaagagacttcacagtggtagggtggcttgtcctgggagcatattatctacttaatgctgggctcagagcccagttctcttgacatccagcttcacccccattcagcttttggttataccagattttctcatgaaatttccatgggcttttaacatacttccagaaatttaccaaaccttcctaaattttatacataattgccctaacactctgaagacttatctataccaccttttatgtgagatacagctccactaaaataaaaaagaaaattaagacggagaaagacattatgtcaaatattacctctttcaaaatgtcatgatagaaatgtaatacaatgtaaatagttgtgtccatttattttacatatattgaggcttacatgtataaatttaattcaaagttgattaaatgtgtggatttaaaataactcctagttgcctatttttttctaaatatgtttcatgtcctatatttaacctgtgcttattgaccatctattatatagaagttgctttgtgcaaaattataaactttatttgttaacaaatttaaaagcagtctggattagttgcattaaactttgaatatgactttgaagaacaactttcaagcccaagtaattttatgagaaatcatttctaaatgagccagcatattaaaaaaaaaacagataaaaatggtctaatggcctttttaatatagttacatagttacagccatgctcactttattcctaagaagccttagtctatattgttatttttgatgactgaggcacttgaaatctattttctatgttgataattatgaaatagttaaaaaaagactttaagatgacattttcagctcattatttacagcgtgttcaggaggtacacgtgtctgtaacttgaaaataggaaccacagaagtgtgatgaatttctaattttcatatgaatcaatgacagaattcacacctggctgcagtcatgtgacttttatgaagaaaatgaatatttatggatatctagatagtgctgtattcctttcttgctgattgctgatcactaggttggctccctgataccctgaactaaataaagccttctaccttatacaacctttactggctttctcttttctaaagccacaacttctttgggattcaagcacaccaccttgactccaacctttcttttcaacatcctcaaccaacattcattttaatttatgttctattccattgacttgttagctgctccttgtacctgcagtaacttttctccctgtcttgctggtgccattgctctccatgggatccttttccctcctttctgtgcccatatccctctgccctttaagatcctgtaaaataccacctttttctctggaatcttcccatatgactccaggtatagaatattttctcttctgtctaaattcttatgttgccttatttctaccatactgtgttccttatacctttccatctttaattatcctgatttaagggcattccctcttccttgaatgcaggatccaggataaatacagcttaattttctgtgatgcccagcacagagctttgcacttctgaggcattagtgaaaatttgttgaatgacactatttcccctttcattcattcattcattcagtcaaacaaatgctccctaatagcaactgttgtagttgacaatgcttgaaagtgtcagtactagacagattgtggtccaggttttgctaatgcatgtatgggtaggtagtttatatttagatataattgttgtgtaataagtatgcacataaatgtcttaatgtaaatctattggtgatggtgaagattgagtagtaatagaagtaacacgtgttgactgattgatacaagtgatgccttttcctacacttgttacaggaattgtgtcaattaatccttgtaataaactatcagataacaagtcccatcctactctctccccctttccccaataaggaaactgaaggtcacagaggttgagtgactttccaaaggtcccacagctgattattgacaaggcttggatttgaatcaaagtccacctgactccatagctatctcttaactatctaatatgaatgtaataaaattcatttatccagagatgtgttataataatctcaactccctaaaattcagcatgaaaccagaagcaagccaaaaaagtaaataaaataaaaagctttgggttaatgagaacaatacttcttaacaaactatgttatctgttttcctaggtcacagcaaattaggaggcccaaactagaggaagatcatgtgtggaggcaggctattggatacaggctcagtgacagctgatggcctgatgtctagggaagaaatggaaagccgaaaaagcaaacacagaactatattactgtgcagctcattaatgacagtggccctgagtaatcaaaaaagagctggcaattatatttagtatattctatttaaaacagcaggatatatataaggcaaccttgaaagactttcagcagaagcagttgtacagccacattattaaaaggggtttggcttcagttttttgtagtgcttacttttattacatctctgagttcctgaatgaacacgttaagtgaggaattactggttgcatgtgctagtatcaatgtatatcatatctagatatgacaaacaccacaaaaaatgttagagtgagtctctgtatcgtaaagctttgacatctttttttgtttgtttttaagcttggagagactctacaagtcttttggtgaaaggtgaatttattccctgactactttatcagtcttttggcttttatatttttctttactaattccataggcaaagattctgccatgtgaattgccaatgttgataacaagcattcatccccttccataaatgcattctgatttccttttccttttatattttaattttcaaacaaacaagcaaggaacataggacactgagccaggcctgagtagggaatgatgttccttcttgactgaatttagaaaaacaagccttgagaaagagctcattgtgcagcctcaaaccacaggggctggcgttgctggtgtctgatgctctccttctggaataccctgggcctcaggaactcacccttgcttttccagctcccagatggtcaggatgggatccagtctttaatggggcccaactggcacaagatctacatcctgggaagagagctggagaaagtttatttaaaaaataaattacaaaataaataaataaataacccacaaaaccagaggtagtggaagcataatgtatttacttcagtcttttttctcccaaatctgttattttgaaagatgatcttgttgccattttgttttgtacaattaactgcattgatttcgggacctggttagatgcctggtcagaactgggcagtatatttctgtgaatgcttaatgaggataccaggaagtttgtggtggaaagtaaaaagttttttttttgttgttgtttgtttgggaattttttagtaaaaagaattctgaatggagtggtgttgattatttcctttttgtagattcataagaaactttagtgaatctttatcttaattattagtggtggctaatggcatcacgatatttattcattcaatgttcaagtatttattgagtgactactagttccagggccttgttaaacactggaaacatagcaaaaacaaagaaggccaaggtcatatccttatggggctgatattctacttagggggacacggacaatgaataggaaagcatatctacatctctctaccatccatctgagtctatgtcgatatctatattgagagaaatttcagtgttaagtaacatgactgactattcaaaagctagattttaagtcccccatttaactcaattcctgagactttaatttcaaaagtctcctttgacattcatacataaagtttatctttaaggattcatgtgactcagcatattttggtaaacatcggtttaaagttattttcttgaaaggacaaaaggaaaccagaatttttgtgaaacagtaaatgcctcctctggctttttctcacgttctctgagaaatcatacactgcttttgagacaggcaattcttgggaatgaaagaatctgtgttatgaaacccagagaactctgattagggaacaaaccaaaacacaccaaggaactcagaagaagagctggcatcccctgatttatgtggtagccacttcagggaaatagagatataatatggaggttcagccagcacagtcgccaagaatatatacttttcatatttcagcttcctttagcaaccctgaaaataatatattttaaatgccgtgtctaactccaaaaagatgcatgtttcagagtagtggagggaaaacaagtttgcctgtttgttccctaacaccttggtatctctttaaaaatccgtagtttgatttggttctagagctttaattatgcttttatgttacagttttcttatttaagtgtctgcttcatgtctatcactcagtaccccctgcctatctcaaaagagatggatattattatcctaactgaggagaagggagaatgctgtgagaattattaatacataaattaaaaaattaatctggaaagtgctttagggtccccagagaagctctacccaaacataaagcatgtataatattattatcagcacctccacagagcacataggagctggtgcagtataagattagtaaactgaggcacagagggtgtcaatgagtgaatgggctagcatgccttagaacgcagacccttcaatgggtaacatctaaaaaccaccttgccagtgcccactttaggctttttctagccacaaatgctcattatttttccagagaagaaacatttccttccttttatcccttctctttgagtctttgcttgttttggactttttttctttacttttaagtgttgaaggtgattaaggttaaaatattaggtcctaaacctagtaatgagaaatcgctggtgtgctttctagtaaccccagttattttttggctttgtggcttgcaacttcaacttgcatttattttacctactcctattggttggaaaacatggataaaggcttatcttggaattgcttttttgttttccttgggaatcattctcagcttgcctttcaccagtgaggaaagttgttttgagtggccactatgttcccagttcatttcaaggtatgggaaaagctgcagatacaatccatgctttcaaaggcagaggtcagatgcaaagtacatgtaccaggaattatggaaaaacaatgaacagtcatatgaacagatagtcatggttgtataatgatggtcattagtcaggccgactggccacttccagttggtttcttgatcatatttcttaactttcctgaaacttatttttctcatctatgaaccagctaataatcatacctaccccataatactacaggatgtaaatcactgaaagagtttaacatagcgcttgacatatgggaaaaagacaacaaaaggtcattatagttgaagtcgttatcaaggtcattaccatcatcaatttagtgagaactagaacaatatagataataaaagctgcggaattctacaacatgcttccactcatatttttaaacactagatactctcatttacctaccatgtgggccatacttttgatatgatgggaggctgtctaatacgcatgtagaagattgtcctcttccctgcctctcttctgggcttccagactttgcaggctgcctctttggagttctacgtgcacagctgcatgaactaccatgcattctctctcctgatttcagctcttctgtcaaggagaggccccattcaaccaccttcatgtctggctccatcttgtcatggccacagtggctttactttgtacccagaggccacagtgggcatatctcgcctggctaacccccacaggattcttcaggttctgtggtctgagtctggagaagagaaaatgctcacacaggcagcttagagggagcagaagtgttgctgccggcaggtccctggcatgctgacagcctcacctggaggcctgcagagattatgtgtgtttcatcttactgccacatagaaaaattatttcttatgaatatagtattaatgcatttttattgttgagcagttggagaattcagagaagcatacagaagaaagtaaaattacccatacctctaccatctagaggtaacttccattaacattttgaagtttttcctttcttctgtgcaaatacgcatctaattcttatataatcacatgtaatacatattgccccaaactgatgttattctactttttaaataacatttttctcataataaaaataatggctttatatgtacaaataggtttattccataattatttacatgatccagtgcaagtttgggacatttacacacacagaaatacatacacataggaggaagaggcagacagagaagacaaatcacactgaatgttatcagtccagaaataaacactcttaccatttagcaaagatcttgtgtggcatactttttaagtattaatttttaaaccttttttttttcatttcatcttatcatttctcactggagttacagacatttagacatccttttcttttttaccacttacatgatatacaagcagtggtctcaagctcatattgagatctgagtgtcgagctagtcagataactaacattaaaagcaacttaggtagaaaacaagagttgagtattatcaggttaagaacagtagactcacctggactcatggataatgattatgatacccagtggagtcaatgatttagtagaattctggcctaatttatgtaaatatttattccagaaatattttgaaaatatcttgtatgtaagtcattaactacttaatttgttttttattttattttattttattattttttctgagacagtcttgctctgttgcccaggctggacagcagtggcacaatcacgacttactgcaacctcgacttcctgggctcaagcaatcctcccacttcagcctcccaagtagctgggactacaggcgcatgctgccatgcctggctaattaaaattttttttttgtagagacagggtcttactttgtttctcaggctggtctcaaattcctgggctcaagtgatccttctgcctcagcgtcccaaactgttgagattacagatgtgagccaccacaccaggccaagttaactactttagaggttgcaaatgtgaattagactgtgttcctgatctcaggaaatatctaatgagagaaagatgtataggacactatttatggcacaaagcaaaataggctgctaagtattatagtatcaatatcataacagtataaattcctcaaaaatgcaggcaactttcacccttaggatcaggtaaaacttactggaagagggaacgtatgattggggtcttcaagaacaagtagaatgtcagtagaagaatgtttaggaaagaatggcatggagaaagcaaaactgttgggcaagggaatggtgttttcgtgtatccacatgccctttactccaatatgtggtaaagcaaagtgggaagtgtgcctaggaagggaaactggccatcaggccttggcgaaccctaaatattattctgtcaaggagtttgaactatgtaataggcaaagggggcagctgagggtttggtttgaggcagggcataatatgatgagattgtatttgaagaagataattatggtggaaaaagtagaagtagagggagaccatttagaaggcaatttttcctactgttgtaatagtgtaagaaacagtgacagcctgaacaggagaaagagaagaagcagagaagagccagtggggcccagtttggggcagaatcaatatgactgaagaaaaataaaggaagaaaaagaaataatgataaactcaagttttctgttttgggtaattcaaaggctaacattcctttaactgagacaggagacacagaaacaagaaatatatttacaggtagtaagatgataaatttagcttgggtcatgttgagattgagatggcaagaagacttatttggggagattctgttactctgttgctaataaaatttgatgcttagccaaagagatcaagtctacaagtgtagatttggaaatcagtttagctgaggtggctgagctaatgagtgaaatcaagaagtgctaggcaaatagagaaaaaaaaagaagacaaaacttgtgatatttctacaactaacaagttgacagaaaagtggagcaaatgaagaaaaccaaaataatcaggaatcaatgaataagagaagatatctggaaaatacttctttataagtataagagattggttttcatccaagtgttttaaataatattaacttgcctgaccatcaacttttctcatctgaaatacataaaccacaaacatgattttaaaaaattagtgaacatgaaagtgctttggtaaaccatcagacactttgcaagtcttacgtcttatgattattgtctcataagaaaatggagtgttccaaggaagggaaagagtagtggcagatgctacagagtttcagaagaatatttatttctagcccaaattgtttggcttgtaatttaaggaagttaagtcaaagaatgaatctgttctctaatcacttagaacagtatttaccaaagtaatggggcatgggtccttggtagtacaggagacatttttagatttgacacagacatgaaatagaactgaatcacactgtgagaaagttagtctccttttggtttctcttttcatcactccttttgtttctcttttaatctttgttttattccataattatgatttttattaaagggataaagtctcagggcaaaaaagtctttaatatttaacactagctaatcacccttttcaataaattccttcaggttgtcaacaatatctagctataatttatattaacttcaagattaatatctacaataccttcttattttgcagttgatatcagttttccaattatggtagtgacataaagttttcttttaaaataagttttttaaataaaaagataatcactttttaaattattaagtatgtaattgtataggtggtatatagatatgacaaaactaagaaagtgatattccaatgatgaaagtttgaaaaatttagactagccctccctccttctgttgctttgagtggctgccttgggttcaaccaggctggaacaatgtgtgaaatttattttgtgatttgtgggtccggagttctacaccctagatctagaccctgtccctcctctagcatgttgggtcaattttcggagccaccagacatttctagatttttgtgtccttatctgtcaaaataagaagattagctttaaactatcactagcattccttccagcaataaattctacagttctttgagtgattagtaaataagcctgtgctttcaaattgatcaaagttagctaaaatgtttttcctccataagcatcaatatcatgtgtcaatgctagagattcttcccagactaatattcacagctaggaaaacatcaacaaatttattctctattatgattcagattctacctcatctgtgaaggattgttgtttagaaggaatctctgctttagttagggcaattaattaaaattgaaaatgaaattgtaaatgaaaatttgtttgcatttcctgagcctaatgctttatgctaaagcctcactctcagtctgtagttttattgcagtcatatctaatcaatttataaagcccgtgaattttgttcctcggtatagcaactcatacatattaagtccctatacttaaaaagaatcttcatccatctatttactaatatctttccatcttttaaaatttatttcccctgagaacaaggagagcaggtgaagtgttttctaactggctgaaagttcttatcagtattattgtgagttaatggtactctatatcccaagtacgtgttaaaattagaagcataccttctatttgaaatataacaacatggaacatcctttaccaccaaaagcatggcaaagctccaggcaataaatgaaaaatggagagagcataggtacagaaaacacacacacaaagtctttggatcagaaaaaaactgagtttgttactacctttaaaaagcttctatatgaacaatttttttctctatgattacaaaggaagtgtttgtcccgtgacttttttgaactgcatcagtgttgccttttgctctgacttgctatgacaagggtaaagttgcttatgcaacaacttaattttaagattctgttttctcacctgaaaaaaaaaaggataaaaatacagtcattgttctgaccaaattagtgtttgtatgtaaaatatccagcaatgtggtagatacctcctgggtactctacaagttttagttcccaacattgcagtaacagtgtctcaacaattaacatgctcttgatttggggaagatcatctttcactgcccttcagagcctctttcttcttattctctctacattattaaactcgatttcctgatttccatgctcacagattacaagagcaaattagaaggtgctaagaacaacaggaaaaaaaaagacaaagaagcggaataaaagagaaataatttcaaaatcttagaaacctggagccatttagtacagggataaatagttcttcatacctcaacagtcatttagggcttttttatattacaagatataatacagggtatttgtaattgctaagttaaaatggtttttatgcagatatgactttttcttgtttcaagaaggaacatttgatataaattacttgtgggctttagcaataacaactttctcaaattattttccctaggacttggtgttagaacagtttatccagtcagggacccattggccgcatccagcctctcatggtgttatctgtgattctctgggcaaaacactcaaactgggcctggtttgcacattgatataagagccctttctaagttatccccatgagaacagaacaagcatgttagtttaaactcatgtatactgtataaattatccactgtatgcagtggactcaataccacaaatattgagctaactgcatctgaaaggagtcaaagagtagacaattgcagaatcccatagaaagagaacatgtagaatccagcaccatcagaggtcaaccagtcaaataccagggctggatttttcaaagaaccagataatgccagttttatggccattaataacattttagttatgtaaacaaagataagagtaatacaaaataaattctgcttcatggtgtaatctgattgccaacagagttcagaaatgaactttctcattgtgcacgtggcattgcataatggaccagtgatcattccgcagcctccccagccttccctttccctttcccttttatggagagtccttagttctgctagatccataagctattccagggaggcagattctttgctttcccctgtaaagctctttgattgtgcctctggtagttaatacaccaaatggtcttcaggggtacttcatacgtgcactccgcagctaatcacagtgccttggcctgctgtttccctacctctgtgttttccacatgttgacaggctcagttcaaacaccaggcccatcagcttctggagagtcacggcaaagctcggctctgatttgggtgtctgcttcagagattttccaaaggatatcctgtagtagataaatcatttcattaggccaggttccctgttcaaaccaggaagcagagggcctgccatgtaggaaaacccagataatattgttatggctgtactcagagcatttgtaaatattgttgtcagtgtctttcacgcaggttccatcaagattggatttaaacatagacaggttaattatgtgttttaaagctttgtttatggagagctattaggaagactgtgaagttttaactattgcaatgacaatttttccccccaaatgtctcctccagttgatcactcctcatgccatccgtgtgcagacccctcctcggcacatccctggtgttgtggaagtcacactgtcctacaaatctaagcagttctgcaaaggaacaccaggcagattcatttatacaggtaagaaccacagcacatggtgagcacagaactgccgtggtcttgtggggtctttccccttatcttgtctgtataaaagcatgtattttattttaaaatctagttaaagcctgctttctttcttcattttaccatatgtatgaccaaacatggtgcttttattattgtattaagaattcttctaggtgtccatgttgaatggcgcgttctgttgaaataactggttggatacctaaagatgccacatgaaaaataagagaaggggaaagaggtgtagctagtcctgagtttctggatgttaagccaccttgttagggtttgttggctttatggagtaggtttgtgctttcatgaacagtacgtctttcctctagcctgttcacggcacttgtattacatacaattggtagttttcatatttaattctgggttggtgccttctttccaagtatgctgcatttttgtcctcccaaaacagccttggcacatggatccgccttgcggcaagaagctagggtttcagagtgaatgtgaattccctcccatcagacagagagaaccaggcagcatctctgtggaatgacatcaagtataaaggctgagtgcccaatgtgtacgctaagagatccctagattgtgaagtgcaaaccaaatacccagggatcttttacaattcacattctgctacagtaggtctaggtagaacctgagatcctgtttcttaagcaatcccaggtgaggctgatgctgctgctcaaagaaccacaggtggagtgcggttctgggccctctgcttagtgtcagtcatccttggatagtggtagctgtctccacgaactagtcccaggtttccttttccattcagtaaaagaccacaagaccagattaagtacagagcggaagttgctttcacacaaagagataacagagcagtgaagggataacagttaacaaattgtaattataaccatacaattaagtggacgaattttatttttctgtgacattttacttcagagcatctttcccttgtatttcaatattagaagtaaaaccaaacatacttcttagtcacccagtttctctctctctctctctctctcgaaattataaaaacaattaatgcatcctgacccttggaaatgcctcccagccctttaaacaaaatgcaggtttggtgcctgcctgacgattagttttagttaactgaaaattataggattgacccaagaggaaaattttgtttgcactccaatcacttttacaaattaaggaaaattaccacaattttgtttagctaaggtttcacactgagttcaagaaattagctcagccatcccaacaaagtcagcactttgttagtgagcacttgaaaaaataatagtctttctggagttttgtggtgtatacaaacgaagcgtagagaaagctatgatgctttatagaagtaggccaagtgtttttaattaggctcattggttcagcgtaagttttgaagaataatcaaactagcagattagctgtttcttttaaagctaggatttcttgccattcatttttcccatgagaacttccacatagcagtgtgtgtgtgtgtgtgtgtgtgtgtgtgtgtgtgtgtgtgtgtgtctgtgtgcatgtgtgtgtgtgtgtgtgtgtgtgtgtgttttacaagtctcattatggggctgcaggaaaaggaccaattgaaacttctgatactgtaacattccccagcatcattccaatggatgggagtttttcacaatgttcccccactgaactcggtgttctggaacatatttcaaaaccacagaggccaaatgttttctctgagaagtttggactctgtttttggccgaaaacattaggcctcgctggctgcttatttactcagctattaagaacaagaaaaggagaagaaaaagaagaaaatgcttgtgtggtgggaggtacaggaggcaatcaggcatggtttccgctttggtgacaacgtccctgcccattaatggttccattttgtggtcaggtctcatttagaagaaattatttttaatcagtcttcaacaaaatatcccctagagccacctggccataaaagttagaaaaaaaaatcaccctcattaaattacttaagttctcaagagaaaagagctagggatccatcattatttggagtttttttaaacactaaaaaaaaaaattgccatcagtttaagaaatcacatcttagaaaatctatatcacactggaattaagaaaaaagtgttggattttcaagcctagaaaagtagttaagggtaagagcaataagttggcgcatatgcacatgtatacatctgtgggaaatttaaggtatgaaaaaatgcttctggtgatctggcctcaaactgtgggcaccagacaagaagcctttttttttttttttaaatattctagaagagagttctaacctctccccatatcggaaaaataaaaatctgaagaaattggcacaatgatttcccctctggtatagttacttggctgttaacagttattgtgacatcacatcatttctgatgaaagggaatctgtgttcattggtgacctacacatggaccttttgatcattagcattaaatgcctctaccatgcgttgcttgttcatggctggggctactggcctctgtgatttactcagtttacctctgctgtcaccacttaatagtaagggtatagagatggctcataaaacctctctgttctttgtatccaaacaactgctcagatcattgcaaatgtacggccccctcctttgtccacccacagaagttcacacttcattttctttaacatccatagtatttcaagatgtgaggcttggttttctggattgggtgagctaaccctcttatttgttagtgaaatatcacttggaatttttcccttgaaaaatattattgagctgaaaagtaacaccccaaactaaggccttattgctgtttttaaagtatgcaagagagagttggcatttgtagatgtaaatgtctctaaaagtccataacattaaaaaaaaagaaaaaaggcaggaacagcatggcctaatctatactaataaaggcagaccttttggggagggaagaatctgaccaagcacagattgcctgcaagctggctccccttgtaaggatggtaagcaagcgtacatctctccctcattggttcttcagaccagagacgcacgaggaatccatagctgctaatgtgccatgcccttgtgtttgtccaatcagagtcacagactctggaaagtgaatcctgactggattagaagcagaaaagctcaatagcactttctagatcttactttattgtgtccagttattcttatgtaaatgtagggcaaggctgactttaattttcaataaatgttttctaagagaaggaaacaaaaacactatctaatcacaggattgatttcaaagccctattatcgtttctggtcagtccagtgggaattaaatccactataacctcactgccatgtaagggctctccctaatacctttattattctcacagcttgttttcttgcaggtgttacatctttaagtggcttggatcttttcgaatcgtgatctctcctgctaatccctaagtagccttggaagctaataaaagactcttaggcacctttagctgcttcctcaaagtttttgtagttggttttcctgataagaagcggccaattccaaatgcatgtgttgccttcattctagttatattttctgtaagaattttcatatattctcggggaatatatgactgaaagaatgggacaccaggacaaggtttgagcagcctaggggtaccctgagagctgtacaccacctgaccccccaaaagttggtgaaaaccctgatgaatgatcatctaacaactcagatgtctggttaggtcacttatcagatcttttctaccactaacttttccaattccaaacatttttcacccaatttcctgttcctgtggaaggactaacccacattcctgtgtattagcctgtgaactaacttcgaaatgagaattcttcgtggaaatacttcctgtttgtaccttgtgcccagaataactccacatcctttgccaatgcataacacgttgctttgcacataggaggggctattttgtctgcatatgctctgtggaacttgacatcttttactatgacttttaagttttccgttttttctccctatccctcttattttcttcttgctctcccatctctcctatctccctttcgccttcctctctcttttctttactcccctcatcctttcctccctccctcctaaggggatagtacctcgcatactgattgactgcttaggttcaagatgatggatatagattgaattctcagatctaccatttactagagaggttatccttgggacatcatatgatgcctctaaaccacagtcaccttatctttataaggaaataataataataccttgctggggttgtttttaggatcagggaaacatatgtaaagttttagaatcatggaactgtatttagcatgaggctagatactagtagtttccattaataaatggtggccattatgattcattcctttgtttctgagtccctaccaggagtaactattttccatggattgtttatcatccttgtcatctccctagaaatctaagaaatgtcttttgggatttttagtaacacaactataggcatcagtttaaagaaacaagtaacacctgtcaaccccaaataaaaggagcaaagtgtaaataaagtagcaagaaaaagaaatgcataagtgtaaatgtaataatttgcttaaaacaaatatttttgcaggaatgcatcacacagctaatattttaatcagatactcctgatttgtaaagttctctggtgttaacttttttagggaacaacacatgcttgttctcttatttccatctcagcccctcctctggaggtcctagcaacaggagtacagcctatcaccaactgtcttcaaaagtatttagattataatcagcttcaactccagcttccagagttttcaccagaaatctctgtttctcattcttggaaacctcctccacaaaataaaggctgccaccttgggcttgaacaaagtcattggttttagggaagaagtggagagtttgcacctaatggatctcctgcactttagtcttttcttacataaattctttgtcacagtacgctctgaatagccactttcatgtcattaccctgcagagaaaccttccctctttgctcactgtatgtaagacgtagcccaagtcccgagtttggctcactgtgctctggggctagggcttatgatgctccagtcaaaccagtttccttgctgtgcctccagctcactttagctactttgggcatggtgattcacctgaaggatccagttcaaactcttacctctctgaagtgttctctgaccgctgtggtatagtggacagagccctgggctgatagcaatgaggcttgcatcgtatcccagccttgctactcgctagctgtgagacaagttgcttatgtgctctggactccagtctcttcattgtgaaatgagtcagtcggactgactttggtgctccctgtaactcatcttgattgactgggagagtctctgtccttgaatctcttttgtcccaggtgctaaaaccatcccattcatcattcacttccttttgtccttagttctcttgttctgttcataggtagacaaatcataaaaagtccacaagcttcatgaagaaatagaaactcttcctcaatcttattttatacactatgttgaagggatttggctcagcattttacttgcaataggtgctatcattgacatattgcccaggatcaatgggtcttcattgatttttgtcctctggataacatggaatgtaaataagagctgttaattaagaatctgtccctttctacttgaagttttacatacatagaacatagtttctttaaatgaaaaaatgggatttggcttatattatgaatttcattttcttatctgtaaaatggagctattttaatagtaccttcatctaaggagtaaaagggttaatgtatgtaatgcaatcctgagagtacctggtccagtatgagtgctccccaaaagtaagtgagaaaagcagatagtgggtatatatatttttgaaaatccaaagaatttgtcattagagtttgatgttatgtatgtgtcagctttgattatgagtaaagacattgtttctttctaggcattagaataggaataaaaatacctgtgttctgttctgattttaccacttccttttgttacttcattcattcacctcacaaatgtttgtggattgcctgtcttattctaggcaatgttctaaaccagttctaggccaagtcctgaaacagtgttaagcaaaaccagacacaatccctgttttctttattctaaagactaagagggaaaatgggtgttcataagtttactatttcaaacctggtacgtgtccagaaagaaacagcgcttttgatcagcacataataaaagagccctgaccagtcagttagagatatttctctacaggaaaaattgcacaagctgaagtttgaaggatgacaaagagctaacccaacaaccagtgaagggtgggggtagcatggggttagggaatgagccttccagcagagggagcaaatgagaaggccctgggtgggaggaaacacggtaccttggacggctgtaagaattgcagtgaggctggaaaatcaagagggaggaggagaactgtgagacagaaggctgcgagaagtagtcagggacaagggtatgcaaaactttataagccatggggaggagttttgttgttatcttaagaacaatggacagttttgaagtgtctgaaatgacaggtggacgtgaccaggtttacattttgggaacaaactaactctggcttcaagaagcataggagaccagaatgtatcttggaaggcctcttaggaggtcattgcagtagtctgggaaagagatttggtgactttgatttgggtggtaatcagtggagatggaatggagtgagaggaatcaagaggaatttaagaggaaaaatggaaaggacttgatgggttagatgtggggatgagggagacagaggggttaaagctgctagatttttgtctccctcaacttaagggatggtagggccatcacttttctgtgcatcccaaggatcttgtgaatatcaatgaaaaaatggccatgaaaatattttgcatagcgtaatattctatacatatgttaattgttataaagacaagcctaagcaaactcagaaagaattggagaaaggaaggcaagaatgtgttttcttttttgtcagattgttttcacttagggattcagctgaaagagggctgggtaatgaatacttgactagcagctctgccttagcagtgtcctaattggaatagacccaacaagaaagaaaaattcacaggctgctcctgtccacatgtcttaaatattactccaaatgaaccatttacacacaaagaaaagaattcaaggcagagggagtgtttattctttttgcttttgtgatacaaagggtaggtcccaagcctctccttttttttttgttccacaacatatgatttttccctgatcagatgtatgctgatgtgatcagtgattctgaatctgctggcatttgtacagttaaatactgttggtgtcataatgagaacaacaacaacaacaaaagtcactgaaagtaaccattgtacttccgtgacagctataaaatgagagccatttctgcaaagaataaagctgatctgaaggaagcatattattttgcatattttacaaatatactttccaagaaatatgacctttatttcctatttggagtggagtgtaatcaggacttgagtagccagtataacaggatcattaaaagggatattttcactgacattagaggtctaaatggccacgaggccttatatacaaccttggctttttcctgtctacccagagttaataagtgataaggccgggagagagataaatcacagaaatccctgtccaaagaaaacatattgactacagccaagcaaataacagaccataaccaacggtcccattcatcattcatgtaatagggatatgaagtatttcctaccaatgaaaccgtacagtaggaagaagcagataagctggtccaatctaaggcatgagatttggttattaaggaacatgaactatttgtcacatggctttaatcttaagatgtgttgccatttctaaactataaatttctggtaagggattagaaagctattaacaataaaagtaggaactgagctgtatatgtattcttgccaatgtaatgcaacactgtaaagttttgaacctctaatctttttagtatgatataacatgatttggttttcaaagccaataaactatttggaagtattcaagttttcactttttttaaaccgaacatcatgataaattaacccttcagcttttgactgtatatcttgaaattttctcaaatattgtggaataggagtaggaagtggaactctaaatttcttttcctcttttcctaagatgtattccaaatgtttgatggaggattattcgttttacttatctgtgtttgcagtgatgtggatgccagtcctgttcattgttaaagttaacgaagagacgtgggacccgctagggcattcacttttgtttttcattctttactgcaaagttatgcatattgatttcagatcatttaggaagcaccaataaaacataattaaaataatattgaaattgcttacattcctaccggtttcttgttacataaacactcaataaatgtgagctattaatattgtttaatgatatatattttgcagtatttttcctatgcatatatctgacttattaccataataattatatcttacatcatattatttatcttttttcatttaaaaatacataaatatcagggagttatgaatttaaaacaatttttagtcattgataatcatcttatgccctagcagaaccttatactgagatatatcattatcttcatgttaaagcatagccccctggaatttggtttctcctctctttttctttctgaaaaacccacagcacagggtcaataagtcctacacctggattatttggggtcaggatctgaaatttatcagccatccccaaatgagtgggtgtgtgttgctccaaggacccagtgtcctgagagcttgggagcggctcccaaaagcatttagctatatagtgtggcactgcttctgttttcaagctaaacaacctccaaggtaaatgaattccataatcatgctcccctgcttcccgggacccaccacgtgctgtacttttcgtaagttaaaatggaactcatctaaaaccctaacgatatctgaaatgtaatcaaatccaaaattgtaacaaaaaataggtaaatgtaggcccctctctgatcctccataggccagcagcatttcttgctagagctttcagctcctcctttctctccctgctcttctggtttcccacttcagtgggcttttgacatttgttgacttttctcctgttgttctctcctattccacaccttttttttcaccctaactctatcttttctcccagtcttcttgttctctacaattactaaatgtaaagcaatccccacccccaccccctggtgccacccctgagaatctgtgtaagacaagccctattattagcctatttttaacaccaaaaaactcaggtgaagtgacttcctgggttatttagtaagtggaggagccaggacttgaaccctggtgaagggtaccagagcctgcactgagtaagcctcctggcatgctactttaccttgttaatttatggaattacctgattccctgaaatgcagttgttggtgatgggagagtggcaggtatttctaggacacgtgagttctgacaggaactggagccttaagtattttaaccaaattatataattgtgaacataatgcatacttatatggaagatttttaaaatacaaaaaagtatgaaataatgattatccattatttcatccctcagggataatcactgttaatgtttttgagtacttacttctaatatagaaaccatatagaaggaagagacagataagctctcacaatctaaggcatgagatttggttattaagggacatgaactatttatcacatggctttaatctttaagatgtgttgccatttctaaattataaatttctggtaagggattagaaagctattaacaataaaagtaggaactgagctgtatatgtattcttgccaatgtaatgcaagactgtaaagttttgaacctctaatctttttagtatgatataacatgatttgcttttcaaagccaataaactatttggaagtattcaagggtattcaaagaaggtactaaaaaatactcctatatttttatcagcaagtcacaataggtttatatagttttgcgtcctgctttgttgtttatattatacactacacatttcctctgttagttcaaattctccctgaatgcattttggtgggtgtataatagtccatctgatggctgcaccataatttgcttcatcattcctctatcattggacagccatatcttgtctttttttagaatttttaacatcagctatgccagaatatagtgtgattctgaatatttggtgttctcccttttttctagtgaagtttagggcttccagagcaagtaaaccatatacatatttatagataccaatacattatcaaatgtctacttacaatatttcacatataaattttgttacttgtacatgtctaatatcacatacataatttacaacatttacaaatacaacttctgcattttgggtttccacccttaatcaaactttttcaagtcattttttccatcagttgttttaaaaaaatcaaagccagagccatttttctcccattatagtctcttctaagttgtttgtgatacacctctttttaaatctatgcatggtgctttcactggaagatttttttctcagccataagtaaccattagcaatattttaaaaaccgatatttaaaaggcttgttttgaggaatgcttgtaatgataagaggtcaatcctccttaaaaagatactacatttatattaactttctaatcctttttgtcttgactgacttctgcacctccgtaagcattactaaaccaccattgattatgattatttcatgcccctaccgatttaaagtaacataattgagaaagcatcttgctttaaaaatactcaaatatttaatgagataactttttttggagggcaggggatctgcccatatatagttcagcatgctgatatttctttcccgttgctgggtcctcagccctgtgcaatccttggtatgagttgaattatctgtaccacaagtcagatatttttgacttgaataaagtaggctcacccttttacatggacctcatattattcaaggtactgagagtgcaggtggaaaccatcccattaatatcaggcctgagtttttctgcagtatctctcaatggtgagaggtagacagaaactggcactccctaaatcatgagcagaaacaacaacagaagagcgacttcccctcatacccactgctgttcaacctggcacatgtaattgttcatctttttcctgttaacatcaactgtggttaacttctttacatcacgggtggaaggcctgacttgctaggcatagccacctgggatcagcctcggtggttagctgcaggaagcaccaactcccagtcattatggagttaatttagatctttgtttaatgccaaaaatatattcacatttaaatatctgcacaaaatatggccttcccagtcattctacacacgttcatcatttccttttagttttaattgatttttaaaatagtcaatgaggccaggatgactctttgagcttgtagcgaggtttagatgaaggagtgtctctgaataatctgttttcagcaagcttgtaattctcataattctctacttttttaagactagaaaaatgaaacatttgcattggttagctcagaagacataggagggttatctaaaggtttagaaattttccttaataaaattactagcatcaaagcaaaaaaattgttgtgacttactggaatgttctgtatcgggggtcaaagtacaggtctgactactgacactatgtgtctcttcttcatcataatgtttgtagaaacaagtaaatgtacttaaatgcatttttatagttgacaaagcctttctcattcatcaattcctttttgttctttatgaggaaagacaggtatttttagccccattttcaggtgtaaaaatgaggtgtagaaagaagtgaagcggttcacttatggtcatttaagccatctagtgatgggtctgatatcagatctgtatcctccaactagttgattatacctttcaatatcttagatttttatacctaccaaatggacttatcccagttttattccactttttagttttctatgaacataattcactagttagactgggggcttctagaacctcaagctgcctccccagcattgacactttgagtacatgtagttcttttattgacagcgctatcaccagctgatacaatctgaattatttctttgcttccttgtgtgtagcctgtgtctctcactagattataagcttcctgaaggccgtgtccttgtctttctcaaccagtgtattcacagtgcccagcacggagtgagatgcaataaatattagtcaaatcaatgcattaaaaaatgtgtgaaggaatgactgacaaatgtgaccttaaatatatgggatgtgagtcttcaagataatctagttgtccaagttgttgatgtctttatagatggtgaaaacaaggcttacagagttttaaagacttggctaaagtctgtcagttagtggtagatatttacaccagattccttttcttccacctatcagccaagagcttgtctccacactacatatattttccttaggctcacctagttataaagaaactgtatgactatagagctctagaatcatgacagatcccagtttgaatcctggcccaaattcttgccagtttcttaaccactctgagactccatttttctcatctgcaaaataggaatgagaatatatcacaggactgctgtgagggtttgataaggtcatgcatataaaaagcttagtacagtgcatggcatacagtaagtgcctgattaatggtggatcttatcaaaagagcatccaagagaacagttgcctgtaattttgagttttagagttggaaaggtcctcagagatagcctggaccaatcctaacattttgtagaggaggcagctgaggctcagataagggaagggtctttcccaaaccaacacaggatgtatttgcttacaaaaccagagcagatcacatataaatggatttactaattactttgtgaatagattcccaagtatgcaaatatataaaaacataaaatttttgaatgtatatgaaaatcaatcaacaaacatcaccatggtcgtttgataaactctttatttctctaatttcatgaatctttcagtaaactctcaaggaaagggtgaggtggtatagacgcttaattccttggaccttccaatatgtgatatgtttacaaaaagggtgtcatggacatcattattctgatttgtttacatgcttttctgtctgttgacaaaaaagaagggggttttcttgacctctgagtaaatcaaagccccacagaaaagccaagtgccattttcactgtgggtgaagtggagttacgcaatttaaaggcatgtcctttatctcatctttttgtgggagcccactgtaagagcagggcatgtcagacaccagcacattgttggaagacctcattggaactggtggatcatattccctgggtccatttggggagggacttagtggggtccacccaaatatactgtcccctgctgcactcttgtaatttaatgcccagtggagacttttggtgaaattccctcttggccacaaaatgtctgtggaccctcctttgtgcctcagtcccctggtggtccttgaggagataagatgtaaatgcctttattcggtgatcttctgcttagtgggtttagaggcaaatcattaagggccaatgagagagaaatacttgcaagatgatggtcatcagggataagattaaaacctgtttgagaagagatctgtgctgtgttcctggcccagtgaagttactgtttgtttgatgcccgacaggaacgttgactggctaacaatgaacgagtccagaaagtgttgttaggattatactgcggttagaggtgaggagggtatcattcaatttttccatggcatatcccaattcataaaaaaattagctgggtgcagtggcttacgcttgtaatcccagcactttgggaggccgaggcaggcggatcacgaggtcaggagatcgagaccatcctggctaacatggtgaaaccccgtctctactaaaaatacaaaaaagtagctgggcgcagtggcgggcgcctgtagtcccagctacttgggaggctgaggcaggagaatggtgtgaacccaggaggtggagcttgtagtgagctgagattgtgccactgcactccagcctgggtgacagagcaagactccgtcccaaaaacaaaacagaacaaaacaaaaaatcaagattgtattatataagggatttctgttctaaaccttatttggggcttgtgttaggattcaaagaaaagattttgtttccaggccttcctaaaaaggcactcaattattggtgaaaagccaaaaagggccagttgtccattgatgctacaggtaatgagtagagtaaaaagtaaaacatatctattccccttttccaactgcagctaattaagggtagctcatttaaaaacagacctaatttaatctctaatataagtattcaattaaagttgttcccgctgctttcttctaagaaggctgctttatacatttatatatgatgcatttatggtgtgaatccttctaaggatccaggtggtaatagaaaagtgctttcaggacttcataattgcccaaattaaataatatgtatgtaaatgggggttgaggtataaattgtgcactgcaatgctataaggaattgagcccctatatcctgctatcttttagccaaccagaataaagtactccccattttattctatactacttagaatagtttattgcattattaagtacatgttacaagaagcacattgttgtttaagactcattgatttaagtagaactattcttataaagttccataggcttttacataaaaagagaagagcccgtataaaattataaaaccttaatgtaataaaacagcctataatataatattctcccattttctaaagaaatcaccaaaaatttttaatgagtttattagaaccactgtttgtgaatcctgggatgtcatgtctaattagacttaatggatttaagtatttctttaatgaaatctctagcttaactcaccaggattatattccttgtcctcctgcccttcaaatgattttactttatttttattttgggtagcattaaaaagaaatgaaagactatgattctgcctcattctcagatggatatagtgaaaaatacagtgcttattatgaagttaatgtgaattaccatgtaattaccactggctgcactgtaatgattatttagttaccactgagcattctctgccaaataacacacattatttcataggaagcatagaattaactcaagtcatcccggaactcggggagagagtatattcctgatctctttcgttgagtgtaggcgctgctaatgttaacatcgaaataatcaagcttggagcaaaccgacagcagaacaggatatgagtttacatgatttgatttgctgatgttttaaacacttagcaggagacagctatagaagccaattaaatctctccaaggtgcatagagttatctcctttgtgagaaacaatttaagggaattgcattggccctttaactgaggggagaaaaagcattaggaatgaaatttcagatgcaaagtgctgatcaatcctgcctctttttgtgtttttcagctttgtgctgtttgggctgttgctattttaaaggatttgcacttttattttgcaagcacagggttatgttaaacttttctttggctattgattatgacgtgctttaaacaaggcattgtgtctaaaagagtaaaacaaaaacaaaaacaaaaaacatgtcagtacattctgtccctttcagatactgcatcttatttagtgtaccggaattcccagtttaaagtaatcacaaaatttatggagaagcggataaaaaaggttgtaaaatatcgatttgaggaaaataataacacaactcatctataataagaagaaaaatgaagcaataattcagggggtatcgagcggcttgctgctgggagtattgatccagtcctttacggtataagatcgcacctgagattgctctgaaagaaagaacagcattccttcgctcattatttcttagatactatcgccttgttacatgggtcctgcagagttggaatagttgcggctgggagagtgggacctgcaataataataataaataaataaatagctcagaaatctatattgccttaaagccaccatgcctggtcttaataacacattggctctggttttataagttcttcattgccttatagtagctaatgacaattcctatgttgtgtggttcatttaggggccgaacagatcttcatcttatataatgggttctcatgtttggaaggaattcctgtcttggctgttgtatttcttgttaagtcactaaattgaaaacaatacacttatgccacgttgggccatggaaaatgttggcttttgctttaatggggcattgttttacattttaagacaatttttggactcagcaggactatgatggttcctgagcaaaatctttaaataaatttggcctgaaactttgaaattcaagttcataagtcatgaatttctgatttgtgataaccgtgaatttattaattcacctagaatttctaaagtcttaaaggacaaatctacttggcaatgtactatcatcacagtgaggccttaaaatggcagactgtatttcattcccgaagaattctaggttcttttcagactttaagatgatcttacaagtagtattgaggaaacatgaatattttgttgtcacattattttttttttggaggggagggtgcaataatattcaaattccaatttaattaaaacattttgaatagctattatgttccaggcattttctatgttctgtaacccagaaaggtgaggttcttgcccccaagacacctgtattccagtgaaagaaggcaggcaatacacaaggaggcagagaagataataatcagattggcaaaagtgttaagaaagaaatagggaggatgatctggtacagtgcaatgaggggagctagaggacttctttagacagccatgtgtaccttagaatttgtacagtatacaaatggatagcactgtaagccctcacagcatcacccaggtacacttatttttatttccaagcatctgtggactttccccagcgctcacgctatgctatcatttgcccagaagattcactctccctatcccatcccccagccactctgtgatcattatctagaaatatgagccgtaccagctgactatgttctcagtagatcaagcttcctgaaatttcaaaaacattgattcatgtcattgtagcagatccttgaaactgttgtttctgtaatatctgtctctccctttctgactctaaaaaaataggtccatggaacaagaggctcatgcctggtgacaataaaggcgaatagagggggaaggatggagaagcagaaagaataagacatctaactatcaagactaactcccaaaatagctttcaataaactgcaaagcacacccctccttctttatccacatagtaagattgaaagtcgtcactgagtcttaaactgtgaatattgaaattgtgagatgtatggtacatttaatggagacgttggtgaagtgcacaagtcattttaactttgtcttttaattttcaagatttattggttccaagggaagagaatatttataagcgttttaggtattcacaaaacatgtagttgccaaacagtgcaaagaatgaaaagaaatcatcattatgaagctggatgattcaggaaatgtggtgataaatatgggagtgacaacatattatctcagccttttctagctccacatttttgagtcatgattatcaagtgtatcactgcagggagtatgctaagtcagtttggagctagaggaattttagttttaaaagaataaccacgccatgtttgggaagtacaaatacagtaaatgatgtcacgtcatctcagtttgaataaatatatattgtataatttgcttctgtcttttaatttctcataatgaaaagaaagtggcaagcaacatgaaagcaattaattgcaacaatgattacttagcttcttggtgcctgaattaaaaagaatattaagattacttttctaatagctcatatgtttttttaaaaaagtcattgatgttttataaagggcaggtgcatttgaattgtcctaaaacactagtttttcccttgtgggcaaacagattgtcaaaagtcaactgttggccattctgctggttgtttcatagtgtagtctcaaattcaggaagataaatgtcatatcctagctaatctattgtaatccttctctgttgtgtgcttctttttaatttgagacaggctgattattgaaatacaaacttgtgactgtcactgtgattttcttacgtgtataagtcctctctcatcagcccagagctttgtattcagcagtacccagtagatgttaagtaaatgaatggatcaagagtcaagaccttgccctctggccatagagagattacattatcatttaaacctctattttcttacctcaataatggagaaaataaataagcatatcttcttcactagtttgttgtgacaattgaaataatacgagtaaagtacttggcacatgataaaaggtgcacatgaagaactcaaaaaatggtagctgttattaaagactttaagtggttctcaatctgtgattatctcagagtttacttccatttggtttacaagtgtatttccagtgcctcgtactatgccttgtctagaagatgctcaaaaagtgcttgctgaatgaacaaagcccccgattcttattaataaataacaaacagctactgctgctaacactcacaaagcacttactctaccacacagttttaagcactcaacatatttttagacatctaatcttaaaaacactacaagacaggtagtattattatcgctgtattacaaatgaagaaactgagtcaaagaggtgttcagcatttgctgaaggttatgcaactagaaagtggcaaaggcaggacttttacactggcagactggcttcagagtccaggctcttgtgcgtataacatgatcttcagtatttaggcacaaaggtaatggaaatgttgcactgtgccccatttattcattcaacaaatatttattaatcatcctcagtatgttagttaccggagataccacgtacataatgtgcaaagatgtgcataatccctgccctcatagaaattatagtctaacaagtctgatttcctcaagtttcagtttgttccatactttcctcagtgactcttgtaatgagagacagttaaagtctgacttgatgcagtagaagggaggctataaacatttgcaggaaggagagtgcaggggtaagcctacaagggaaacagggtggtattgtactgatcactatgggttacccagcagagagcccgccttccctttaggatgtatgcatgtagcatgccttttgaagccctggatgccactgaagcccttttctcctctcaaattttgtaagcagatgtgtggtcttgccatctgtaccaccacactgacatctgggtccaaactgagcaaagcattgttccaatttagccacaaggaggcaagctcctggctcagcctgtgaagggtgatggggtatttggaatgagcccactttctttttcttttttttttttttttcagcatgagggtgagaagtcatgttattttacagaaaggctccactaactttgtcttttatgtccagtgcctcaacttcaaggctacaggaattagtgcccacgtgtccacattttaaatctgtggtagaatgtcctaaatccataggcacacacaaaccgtggcacatgcatgaatttcacactgttctgcttgtctctccagtttgaatttgccctcttcattatttagttaattcatttgttcattctttcattcattcatctatttctttattaaatgtttactggggaattaaaaaaaaaggcagctgcaaggatagagtttgcatgttaggcaccacaagcacaatgactggcagagagttaaagtcctgtaatggttgtcagataagtggattgatgaaggaataaaaaaggaattcaaaaaccattacgtttatacttcaagaggttatttttaatcaggaatggattcaagtaaaatattctaagtaatttttgaagaatgagtaagttactcaatttaaaaaaataaagggggcaaaagaaaaaatcaaatttgtcccaacagagttcagtgattttacaaaacaaatccattgatctagactctcccagttttgtctgccttttcctgtgatcacaggtcaagatgactgattaccctgggaaacacgctatagtctatctcataaacagaaaaaaaaaaaattctcacacttggtcagaaggcagccaaaacgcttcatctccagaggctgggaaagttgatctgtggttgagatttggccagagggaaacagcctgccagaatgagagcctggaatctggggggctcaaccaagactccagtagaactcacctcaacagcccaacacattcagcaagttagcagccagggccaactacagaacttagtaaggtttgctgctgagctctttaagctgctaaagtaccattgacattttggccaagttaggaaatttaagaaagagagccttaaaaacaaaagtatctgatttcacactttctttttttcaataggaaaacttccagatgtctttatctacactatttcgttcagaatcataggtgatctttcaccaaactatgttttgaatatttgggcactagtttttgcttccacggataggtcctgacccaaactccctcaaacatagaggttctccccaaatcctatcatggcaaccattttccatgaagcccctctccctccaagggcattgtaccaaggcccttgcaggcctcagcctttgttttcttttttaaaattctgtgggagttccaagtccatcaaatatctcaaaatgccttcccaatccctgtatttctttccacttttaggccttcagctagttaatcccaataaagatttaggagcttgaaaataaaatgaacttcctaaagtagaagtctattcgtctcttgaatttcattctctgccttttattgaatgtcaactatgtgcaaagtgtggtacaaagcactaagataaaataggagacaggtgcagagcaaggatgaacaggaggcaggctgtgctggcatatgatgcaaatcaaagtgacaaaatgctctggtagaaatctgggtaaatggctagggagaagacagcctaacctgggagtccagggaactagagaagtggggaggggatatggccagggggctcagggtaggaaagattactttaaatgtgtgttttctacttttttcctaattactgagctccatcttcttaaaattgggcaatgggcagtctttatatgtgaaaaaaaaacaaaacaataaacattagtttataagaaattataagaaaaactctacaccatcatcatctatcccccttttaattttacttctcagccataatatgttctacaatagtccaggaccttatacaaatgatgtcccaaactcattgttgtcattgtcccactctgtcctcttaataccttatctccccgacctctcatgagagatttgaggttacttagggtgttttcattttctttatcatgctatggaaaagcctgagcactcaactgaattcaattttaagtaagaaaaattccttgcaattaaaattgtttgcattgaattgagtagagtttccaatattcatccattgtcatctaaatacttttgtttagagcaaaataaggtgcttattacaatgagtcaaatatttgggggtctttgtcaggtcaggatggtgtttttgatctggtcaaaatgtagtatttgctaatactttttctaactagaaaaaaatccaatctgatatcatagatttggaatcaaggctggtgagtggcataggttgaggaggctcttttggaaaagttattgacagaataaataaatgaatgaatgaagaatactccagcctggatttaagagtaaaccatatcacttgcttccttctcaagatggccttgtgtggattcttatgttattgaagctttggagcattttgctaggaaattctttccttctattgcaacatcgtggcgatcaggctgcactgtcagttgagcactggggactgagatgtttgtgaatgctgtggtcagtcaggtctgagttcaatgaaaagtcattgcctgagggttgcataacttgattgctacaggtagagaatggcctttcaccaacaccaaagatttattggcttttgggtgggaaaagtcagcttttatatttcaagagagtaaatcatctcttgttaattgtgaagcctttaaaggctatttaggatggtgaacttctgctagagcttcatgcagtaatatgtaaaatatgtagttgaccagaagtttacagttttgactaatagaagtattagtcaatgggtaatacttcaagtttgccaagtcccagcttataactggaccttcataagccagcctcatgttctaacagtcagaagcactctagacttgcaactttaaaccctagttagaaaaaaaattagcaaatactatattttagccagaaaaaaaaaatctagggctacaacattttaccagggactcatgttaacatttggtctacaacaactttgtttatagaatactcatgcaggtaagttttgtggtcgtcacaatctgtctgaaagtaaacatttttggaagtagaaatttgagaaagctatggtggtgctatttagtaacataggccatggagaatttggtcaatgaagatcaacaactttgatgaaatagtttttgcctgaataatgaataatttattttgcctaacagtctacattgctaaaaaggtgaaagcagtggtcaatttaatgaagaaaagtgcattcactcaaagtttttggcagaaaggagaaaaaatatctggttgattgatttccttatttgctttccagctggtggttttggtgtggtcgagacacttcatggggttcctgcctttagttatgctagttgtagcagaccactaccttgaatcaagaaagcatgttggtctaactctaagattatagccagaacccatcagagggctagaatttctttccactaaaagttcctttataaattcttgtgttttgttgtgtttctaggtatatgtttaaatggtttcaaaattgattgcttttaatagttcttttgttgttgctgacagttgtggagagagtaagatggagatacacaaagccttttcttattaacagatttcctgttatacatgtattaagattgtcggcttctactccggtatcctttccttctagcttgcttcaccagagggagaaagactagctcaattatattatcctgttagattgcttaaatcatgtttagataaaaaaaaattactttctgctttcttactatagttcatgatttccattttgtaaggcatcttttctaaattttgtgctttattatttttgcggtgttgagcgagcgaaaacaaactctagttcataattcactttaaagaacataccctttctttctattttcttgttaaaaccaaattgtgtgcaatttgtaggaaattgaaaccacatttttcacttaactttccaaaattaaaatttatggggaaaaagaagcaataaaacagttacaatctggtcatctataattatctgtgtggtgtgagcagttccacatttgaaaaatgtgacacggataacttatcaagattttacaaccgtgggacatttcacttcttatttgctgcattggagccaagatctccacaaaatgctgaaagttaccactgtcagtttgaaagttacatgtgtgaagaggagctttgaaatgtatagaaaacaatggacagtatctaaaaacagttgttttcctccctcactcagtaacgaaatgtattacagtaaaaatttgccattgtagactgttcttatttccagtattgttcttgatttcagttactttaacattctcttgtcacgctctactgggtaggagaaaaccacagaactagtgagatgaaccgtctatttctgtttattggtgctgccattgctgtcttggtatctccatttctaaagctttctgcatctttatagatttcctaagaaatggatccttgaagatattcaagtcctaagctgtgcttttttttttttttttttggaataaatactttttccccttttaatcttgccatctaattgtttctaagttataatagtaaaaagttttagattctaagaaatttgatacttcaatcctagttcttaatagagggaaagttcatttaacaatggctcctttgtggaaatataatcatatttagacaacttgatgcagctgtggtgaagtcattcatttgtgttttcattcagtaaacttttattgagtatctatttagtttcacatcttctgttagaatctaaatatagagtggggaacaaaacactacaaatagtactgcacatagtaattattcccttgaaccttagcatcatcaacatcattctagataaaaatgtatggatggacagatctttggcagtataaaaaaaccatctaaaaccactacaatcctgagtctcgacttaagctcaactgaaattgcacccttgcctcagcaacttacaaatgctcaaatgttttataaatattttggccatgtccatttctttatttgtaagttgattctgatcaatattatcagaattttaaagatgtattcatttaatggataagtacttattgtataacgtagtcttctaagtgttttacaaatatttagcccattgaatccctgaacatctctatagggaaggcacttgactgtcctgattcaacaggtaaggagactgagacatagattaagcatttgccagagttactcaagtggaggaacctggccagaccgtctgactccagaattcatcctcttaactgttccactgtactctttcctcagtactttggtatttctataactacgtatgtcttttaaaagtgtgatgatccctgagtgtatgacgcttggacacatctggtaggattctgcagacagcttactctgcctgtaagtggagaggttccaaagaggcatcagtaaaggagtccctggcatgtgatggccctcaggtcattatgagccaggggcaaacgcaacatgtgtcctaccttccattcattctaagttgttcattcgcccgtctctctaatacgtgcttagatataaaaataatatgtgctaatttagaaaatttagagaaaaacaggatagaatttaaggagttcaaatcatccaatagccatcacccagagttgaccactaaaaagatttttgtatatttctttcatatttttctatacataacaaatatatatgaacattttcttcgtatttgtggttatactgtatatgtgtttacacacacacagttttatatcctgtttttttcacatagcctaataagcattttcccacgcattaaaatttcttcataaacatgttaataggctgcatcatctcccacagtgtggatttactatatttatttatccattcactattgctagaaatttaagttgttttatttatactcgtataatgatacaatctttgctcttttctctaactttgatgctttaaaaaccatagtaatttgtggtaactaaatgttctatccctttatgaagatttttttttaaatgccctaaatgatttttttttgcaagtggtagatttttaaaaaaaacttttgaaataattttttcatataatgcttttattatttgcactataaaatgatgctataaaatatagagtagaaataaaatatgcccaagtgtccacatgaactcacaattagtctaggaaattatatctagccgtaaagtgagaatattaaagctcttgtatctatattaatacaatcagccatactttttaatgataagtatttaatctatcagtctcctctctcttttttatcacccagttgcaaactagattcattttggataattacctttggtactaaatgtatattatctgcccagttaggaaatagatcagagggaattcataaatcaatagtaataaagtaaacagagagaatggaatctatttcctctcttatcatttgtttgaacccatgctactaaagacagggaccctgtctaatggatgtcggacagaggaccacaagtaaaccccactgggaacagctctcctttaagaattgatctgatatttcaggaaatatcttattgtttgaatattataatggtaggtgcttaatgacaactacgatgctttgacttctgctgtttacagaattgatttcagtttctctttcaatgtttttgtatctattcctggatgcacctcctttctctccaacctctttctagccttcataaaacaatttttgacagagcattaatgttagatttaccagtgttatgctaaccacaatctcattgtccaaagggagataaaaatccagtgtcccatactgttgactacaaaagaggctctctgtagtttcaatgttgatgtcatcatgagaaaagataattcaatactcagagtgggacctgtacctctacttcagcacaaacatgggagagttagtttaccttgcccagacctctaaatattctagcaggctaatgaaactctgagaaaaggtatgtccagcctcccttgttgatatgctaaatccaacagccaagaaaatattcctgccgtgtaaaagaaactcatcactgctattattcagtgtatattcacctccctcgtgtaatacaaaagtattacctgttttccccaaatcctaaactctataggaacttattgacttatgtcacaactaatggcattgctaggaggtatactagagcccactttcacagttttctaccaagtgttgacttcactgtagcgtggttgatcctagactcaagtgacctgatttggtggtgccttccacaccaaagtttcaaggccaggaatatagtgagttaggaatctctttctgtgtttacaggattatggtcactgttggttttagaatcttggccaaggggaagactattagattctgagtttatttccaaagcaaaagcaggaaatctaaagagatggcattgcatattttgggaggtggatcttcttcatggtttccagtattttaatgacaattagaaaattgtttttgataggatccaagtagttccaaattcagaaagaacttaaatacgcttctgtctttcacaaagtccaattgtaaatgatgtctttattagcagagatacatactcttgcacccttgtcactttaagaggccacatactcgggaagaggtatgtgcttcctcaaggagcttgcttctcctggcatagaagggcagtcaatctaggccctcttccacagggaattgccatgctgtgggccacaacttgacaagattgccttggggacacacctcaaactcctgcttaggtttttctgctctggagagacaaagtgggactttcaaacaggccaaatatttcaagagagaaatctgcaattagttttcttcccccctcctttgatcattataccatccttttacatctgccaggctctatttacaagcctcctcttccctcagtaggcacatttgaagcctgcttaactggtattcagagggcagaatggcattatttgtgattcctttgccactgactcggagcagtgatgggaggacgtcaattttgcaagggcagcattatttgacgctcttactgctcagtcccagaacgctcgtttggttgtgaagatgagcacttaatatgctctcttcttttctctcctgtcccttccatattcctgctgaatctcacattcctctaagcacagccctgagaatgccagccttcagacaagccagaaagaagacactatgtgaaaatggggcattaatggtttgtgaatccgaagatagttaactgatatgtgcattcaattaagattggtttttcagttaaaagactccccaggaagagcagctttattctcatttctgggttatgagcagttaatgaagaaggcataccagaattccacccgtgttatccggagctacctctggattccataaccattttcaacttacttgatgaggggaaacttgccagttgagattaaacaagctggacgatggtcatggagaagcgtgtgtcatttcccatgttttttgtgggtgatgtcaccaccacacaccgcacagaaactggttttgtatttaagtgtgatccattctggcaactttcccttttaaaacatatgtcttaaccaagtcaagtctttatgtagcatatgtggatatacatttatatttttcaagtctaagacagatatttttactgtaggcatcttttactatttgttttctcctgtgttgtcctgaagggaaagataacaccattacttccaatgtattagctaaatgcttccacaggggcagtccatcacagagaagccagtgaacaatagtgacagcctgccctggttcagctcttactgctgtgcaacttaggcaagatccgtcacccctctatcgtcctaagggtctttctcctgtaaaatggtgatgataacagtacagacttcacagagacagcaaagagttggtgatttgtaagatagtgcttagcacagtcactggcacaaggtcattgtgcatcaattactatgaactactattcttatctcatttccattacaagaatgtaggtaaagtcacagcatgttgtttttagtcttggaggtttttgcaaaacagcctttaaaggacagcttggcaatggctttaaaacatgcggatgctttgtagacatggtccatgatactttcagggtcctgggaacatttgttgtcttccttttagttggtgtttgttttataaagtggcaggtctatttggctttgaaatggccagcagtaataggagatagatcatgtatatgaagatgtcatctgaatgacagatttgatgttgtctttttccataggtgcaattcaatcacatttcatttctttgcctaccaatccttcacccaagactagcagccacagttttctcatctgtgaaataggaatatctaccttttggggtatccaaaggaaaaaattaagtttgcaaaagtgaaatgctcagaaccgcttctcaacaaatgatcctatttattttaagtcaggcttacatggaggaatgacacagaggactggggttggttcggctccaacatttgagttttagttgtgattcagctgttgactagctgttgatcttacactggtcacttaggctttccaagcctggttgtgtttgctgaaggaagatttttgcagtaataaagttctgaagttgattgagtagatgtgcctttgcccctctctacctgaccacatcaagatcacactgttaaatctagagttagaagggagacttagaagaatgtattcgtatctaaaagttgttttggtagcttttgaaaaatgcaatccagtatatttgattttgtccttaaagggtcacaatacctattgtcccaatataatcacaaaaattttccatttgagaataggtcagcagtttatcaagccgatctctgctcctgtagatatgtcccagccctctgaaaaagccagcaacaatatctcacatattggtctcaggcaaagtgaattccgcagatggagctaaatatgtatttttatttcctctaaattcaccaggcttcaataggagcaggaagattatagagagagtatagaaggaaggtcactttttttttccttgttggttttaagcaggtccattccacccatcaatatagagagaaatgcaagattcagtttggggaacttcagtctcttaattccagttagaaggaaaaagaggtccagaggaatcttagcaagaacaagggcttctggtaacgctagatggcatttctaaaggcctttgcccacttggaaaaatagtttatgtggccactgggcctacttttggggatgcctctgaacttaatacagatccagtctctaagcttaaaattctttcatcctccccacccaaaatagccagtttgccctccagaaagcttgtactgatttctaaccaaccttctgggtataagagttctcattatctccattaaagttgctgttattaagaatttaaccaattgtcacttttattagtaaaagctaacctacttttgcttcatcttgtgctgtgacaaatgctatgctctaacagcgtcctgtcataaagtcttctaatgatgcgtgtaccttaggagaaccatttgcagctctcagacaagctaaacagaaatattaaccacgagtcttcccccaagctggaaataacccaaagcagtagtaataaaaacttaaccatgatgtcctgaaacatggactgtgctatcctatccttaaaagttcagggcataactttagctaagcctctctttcactccctacactcacccacattattccatgggaattaggaaagcctctctagcacttgggatggcacgtgaaagaaagaatcagagcctgaaggtggaggctgattggtttcttccacttaggttagtggattaccagggtgtttgcttatagatcaacagcaacagccaacattattttcactttctcctggacagtgtggtccatattccaattagaacccccaccctccctctttatcctctacatttagacaacaaattatatccacatggcaatttctttctaatgcagttaccagacccctttctttggggcctaaattcaaatgagattatgaaagcctttgggtcagtaatgtagcaactggtctagtctcttcagctcttgagaactgatgtaggcactaatgagataaattcactaaaatgcttttacatggagacttggtaaagatacacgacacaaagagtcttctgtgtacctggcttaggtgggtgggttcaaaccttttccttgctgaaggtcagaaccagtgtcaaatttacagcaaacccacttttgatgcttggtgttccctttggtttttatcgtcacagtaggtattacctgaccaagaagtaattacaccattattttttatgtggtgctttattacttgcttttcaaaattggtttccaccatctcacgagctaatagcaacaaatatgtgattgtaatgttcactctgtcaggagacccggggttattgcggaagtggccacatacccattgcccacacaataactgttactccaaaacaagtgaactgcttaactaaacatctattgattgtaagacgctggggaccaatattaagaccaccaacatccaaaggggaagattaaattctagttattatacactatattttgtcaatattttgtggcgaggagacggagcacaagtccaaatctagggtagattagaagaagtagaacttcactgggtaccttaagtcattaacttagttcaatccacttcttaaaagacaggcattaagagtgtcagcagaaaacatcaagaaccatggaaatcccctcatcttcactgctccaaatatactaacaggaattaaccaaatctaaaagtcagctcaaggtttatcatcatagttgtttccggtgaatgtgacagcttttgccttgaggcatctgaagttctacagttttctttaggactggggactgatctgggactgagtgtcctccacgctttcttgtatggctcttatgataagctaagctacaattgggcaaacaagtttgccaacctcacttactcatttaggttcatatctttttactgggagttatagagtgagactgaagaaaaccagaactttaggattaaagcatccacaagttgtctgaaactgtgtgtgccatttatgctaatgatcttagtataacatttacaacttcctaatatactaatttacaaatttgcttacatttacaacttctcctcagacctctcctggttggttgcttgactgcactagatggtgttgataacaccttatattttgagttcctcgtttcggtgatactattctctcctggtattctttctatacctttttgacgtgtatttgtcctgttttgtctctcaatctctctctaaccattccttacctgcttgtgttccccgtagtgtctgccctgggttctcttttcacatgtggtttttgctattacctatatattggtgttcctgatagaattaactccatcactgatctttttcctaagcttctggttttttttttgacagtgtctcactttgttgcccaggctgcagtgctcactgcaacctccacctcccagattcaagcgattctcctgcctcagcctcccaagtagctgggactacaagtatgcactaccacacctggctgatttttgtatttttagtagagacggagtttcaccatgttagccaggctggtcttgaactcctggcctcaagtgatccacccaccttagcctcccaaagggctgggattgcaggcatgagccaccgtgcccagtctgagcttctgttctttattctcgactgtctactaaatatttttacctagatcttctggcacctaaattccagcatgtctgaaattgaactcatgattttttttcctcctgtatatagttttctttctgctaaatggccactgtttccactcagtcagataaattagaaatgtcagccatcccccattcttcgtattgccttacatctggcatgttgctgaattcatgtagattttattctaaaatatctctctgaaatctactttttcctccatgaccaccccatcattagttggtcttttattttccatttggattattacaataatgctgcctttaagagccaaccttcattttacttctatggctctttaaaatgttgatcacatcgtgttgctcctacgatctggaaaatcttaaatgactccttgctctctacctgctcttagcaaggcaccaaggccaatactgttacttatggttaacctttaacacctcactctcaacatgttaagctgtactctgcccaaactggaacatccaaccctacttgaacacatcttttgtataactccctttgctctttctgttcctattgcctggaatgcttttcctgtccttttccgtagaaaaatcctatttatctttccatacccaactcagatatttgagctaagtatttccctgactctactacagagaattaattttttcctccttttgtgcagtgtacattaataatgctacagttttgtatatttttgggtagccaattacaggtctgtctccccactggaccatgttcttctcaagggtatggcacagtgcctagaagagtttttcaaatggaatcaatcatttccagctggggactcacagggcactggacttgcatgttgtacatctttttcttttcatcttcttaagcatggggccttgtatacagcaagcctgcaattttatttaattaattaaacagtataaaacaccccaagtctggaaatgaatcctgtcttaattaggtgtctcctatttttttctcctttgttcacagaacttacattgttttaaaatggttgtgtcctactccagatggagctcattttcagggtaatatttgagaaccagaggtggtagaattttttaaactgtaattccaagttagcataaaggagatggggaaggttgagtcccaaggacaagtgtaacacacccgctgttctagaaccccacatcttcctgctgttgtatttgccacactgttttagaattctgtttgtgtctttctgcccctctagactctggagttccttgagagtggggaatatgtaaatatgtctaattagtcctgtattcattgcacctgcccctgtttctagcacatggcctatattctattaatagtaataacaactgcctattgagtatttatgtgctaatcactgtacaaataatagcacattaaatcttcactttacagttgaggaatacttaaagaatgtaagtgacttttccaaaaggaacatatatcctgtcaattatgtagcctggctgcagtctagctgagtcttactccaggacggttgggacaaagggaagaagaatgtgttattaggaaaatggaagtcaaatgggttctggagtgttttcatggaatataaattgagacaaaggaaaggactaaaacagattgtagatagaaggatacatgaatagcaaaaacagtatcacaaaagtcctggaagccaaaattattagagatctgctctgaggagcccttggttggcctaacttgctgctctaatgaacaggttcagagtagggctctcgaggcagactgcctgggtttgaatcccagcccctactttcattagctcggtggatttaggcaaagtctgaactctccaagcctccattttcttctgtgtctaatgggaataatgatagtacctccttatagagttgttgtgaaggataggttaatccatataaagtgcctggcacacagtaagtccttaggaagtgtgagctgctgttgctgctgttgtaattattaaaagaagacaagatacacatgaatgaatgtaattcattgtggcacttagcatttaattaatattatgcttctcagtgaatccatgttttctaaacttatcaaccaaggtgtccctacaaacttaatgggatgctatgagatatttcaaacttgagggaaacagtgatacttcaagtacatcagatactgtataaactaccagtttaaggtagttcaaaactcaatattacattatactgcttttttttttttttttttaaagacagggtcttgctctgtcacccaggctggagggcagtagtgaaatcatggctcactgtggcttggaactccccagctcaagctgttctcccacttcagcctcccgagtagctggaaccacagtcatataccaccatgcttggctaattttttaatcttttgtagagacgaggtctcactatattgaccaggctggtttcaaactcttgggctgcagctatccttctgcctcagcctcccaatgtgctaggattacaggtgtgagccactgtgcccagccttacagtgcatccttttgatggtgtcatatctttgcaaagctggttttcagcatttactgtggttacaaaaaaaagtgccacgtgaaaaccaatatggaatcaaaaatgaaggtggctgtgtttagtctgattctgaggtgtgcaaagttgtgtggtgcccaccaggaacacatgtttcactagtaaattgtgattattttaaaatgaaataaaatgttatatattttttgtccatttctttatatagtttttgtcaaatatgtatgtcctactaagttgctggaacataaagtttaagctgttcgcatctaagtagttaataaacagaattgttgggcattgcttttggcttagggatgctttgaagggattgctgagatactcagggtactgtgaacagagaaagtttgaggagctctgaagtagtagacaataaatgtataagcaaaatgtgtgttaaaagtgttctagagtataatagtcagggggaggagacttcttaggatcaagatgctcagcaaaaataatcatttaggttaggtcaatactgaagaagcctgacttcatttatttttaaatcaagatgctatttaagttgaagctttggctgataaaaacttccaggcttatctgcaaggccattgtagctcgctgcatggcatacttgttgtaagttctctgtaattccattaaaatgttaccaaataatcacttaatcttctaatatcttccagttacaagtactttcctgtcttattagtggaattagtggatgatttggagtcacttttttatcaccattcttgggatttgttttttcctttccagtctgaccgtctgcagagctctgttataatttcattacaactcttctgaaacctgtccactggtttggaggaaacaactctgtgaacagtgggagtcattttctgagttgtctcataaaaccatgatattaacaatcacaagtaggacttcagcccagaactccgcgtttggttagcacaaggctcagggaaggatttcttcgccttggagcctgactcggtgctgtcccctgctgagagccataagtcactggtaggcttgttctaggagagtaataagtattgttgtttagcaattgtgttgttgaaattcagctccactatgtctgacagtatttatctaaaatactttccctggtgcgtgttcaagttccagtaaaccgtgtcttattgtgcgaccttttcattttccagtgaaaagggatcagctcgtcagataaaagctacaagccagagtacaggaaaaatgcgtgctcagaaaatccaagcatgattgaaaacaagatgtgttaaatcaatgcggtttatcgcctgcctattcccggcaattgctgttctaagctcattctgaacacacacggggtgataaaagtatagtgtcacagcacttgctggggtggggatataagaaaacatgtttatcagacaggctgggtgattttacccccttgataacagctaatgtcaaaactctttgggaagaaatctgaagaacaattatagaagtaatattactcttgttatatcagaaactatgccagtagggaagagaattatggacgtatccttaaatgttaagaaagacagaatatgttggtctccaatatttaaacgccatcatccattacaaagtggaaattattcttctcttctcatttaaaggagcaaatttggctttgaaacctaatcgtgaatgatccaaattaaaaaaacacccaaatgaaaaagattgaaaggtcaaaaaaaaaattgtgtacattcaacttctgtttgctcaagggattttattttagttttaaagttggatcaaatttgggaatctaaattaaggctcctggacggccatgctgttcagagcactttaaacacagtaacaggggcagcttttctcatcaactgtagtacacttagagagcaatacagtttctcctaattattggaggttcacctacttcccattttagacacagtatagccctccagggcaagaaaggggtctgttcatgaagagatgctccacttctgccagtaacttctcaccacacatctagaaaatgccaaccggttgtagtataaattggtttaatgtatctcagagacagcatttgtgtctctttctctctaaagtcaaatcagcatttgagagctccttgtaggcttagaccaataagaagaacctgatggacagaaaacagtttcttgagcatttgggggcaaatttaaaatactagggtggcctccccaaaaggtttgtgttagttgacatggtgagccttacataataaaaatcaggccaccaaacggcttgttcatgtgtaaaatgtcaggagcctaggcacagagattcctgttagtgctgggattttgtttcacggatatttagtaaaaacaaaaacaaaaaacagcagtttaattgatttggtatcaggacttgttaatgtgtggcaaattgaggttcatcaatattaacataaaatagtcatcttggaataataaaggactacaaaaatataaacaatgaggcttctgtgctaatttatgcaaccaactctttctgtgcctcagtttcccacctttgaattaggagtaatttttaacatttacgtcaagggcatattgtaggaaccaaggagataatttctagaaagcactttgttattactggaaaaagagtcttatatgacctcagggtatgtttaaaatggcacctctacaaggaatcattgtgactgttaacacctacaatcttcagaggtccttataacttagagaataattgagttcaagatgcaaaatcttaaaaattagttttcttttgcagatgcctttgaaagtaacctgtcaaaatgtaaattggcataaattttatgaaggatagttaggaaatatgtatactgaaagacttgaaatgtgcatattcttttatcctgagaagtgcttattataaatgcttcttaagtcagtgaaaattttgggaagaaaaccttacattccagttagtagaggatttgttacataaattatgtctatctgtataatacggtaagctacaaacatcaaaaagaaagagataggtataagcctgtatataatctatatttttataaaacagtattgtgaaaatgtttggaagcatacatactaaaatatcaatcatgcttctacatgaatggggatattatgggggttttcctcctttaaactattttttatataataattatgttaacattacttttagatttagaaaaacagtaaggtgatttcattttgaaaaacaaaagcaagtctcttaattctttgttcctcttcttgatggcttttacttctccaagaattgttaatttccaaacatatgcaagttctttgcattccaagctacagtcctgaggatcttccctcatcagtcttcctccgagtgcccctgctttgtttcatcctcctaggctctttgcttttcagttgaccttctgtcttcagccttttctttgcatgttaccctggctgcactctttgtaaaaaggacgtaaccactcaaggcacctaatacctctgattgtgcctgtggtagagaggccttgcttcctttgcttgatttttgaatctcaaagttgttgtcacacatcaagagacctgaagactacaaataagacatcagggtgatcggacgcggtggctcacggttgtaatcccagcactttgggaggccgaagcgggcggatcacgaggtcaggagatcgagaccatcctgtctaacacggtgaaaccccgtctctattaaaaatacaaaaaaattagctgggcgtggtggtgggcgcctgtagtcccagctactcggaaggctgaggcaggagaatggcatgaacccgggaggcggagtttgcagcgagccgagatcgcgccactgcactccaccctgggcgacggagcgagactccgtctcaaaaaaaaaaaaaaaaaaaaaaaaaaaaaaaaaaatcagggcatgttcaaaggcagtttggaaattttcctctggcttctctattggttaattctgcctatgttggcttcgtcttgacacccttcttgttgcagaaagttacagctttctgtggttccaggagtccttccctgaagccctcctgagcctcgctctctccgaggcaggggcaccaggctgtaaaagcatttcacgggaaagcaggagctcacttgcaaggaatttggtgttgggtttcttaggaagtgtatcactcccacggaagaggtgacctggtgtgccgtttgtgcatcaagtatctaggcaggtaatgaaatatccaaatggctggaaatgcaacaaatttcctcgtgaacaatatttctggccttgttcaggtttctggctgatttttcggtttatatattttaaactcagtcttaaagatagatttgtgaagataacttgctgttttattgtttacctctggttgttaatttagtgactgagggaaaaatggggccattatggaacaaaaaggctctgcctaacacatatgtaataactctcatgcccagaatggatctgccttggagggaaatgctctgctgttactcctttagttcaaatatggagtagtcaccagggaagcttggagacccaggtgctagttttatcattgcctctgctatgaggttttatttattacttggcatagagtctagatatttgtttggacattaaatggcaatagaatattaatattgccttcctaatatctgcatttctttttatttccagtcaaaatgacatcatgtcacacaaccattaaaaaaaggaaattaaaaccccagaaatatgtgaaagcacggcagtgagtcgctgagctataaaagcagggaattctgtaagccaatgttggaatggcacccaaagcacttttcccctggtgtttctgaacagaactctgcagcctctcatttccatcgtttccaggaataagtattcaagaagttaacggggacggaggagtggcttctttaaaaggaaactccaaaaagagaaaaatcatttttcataactgagaatgcatctggcttgactatatgattttaatttgcaaatatacccccttacagagaatttcctttatttgatgtgtttgtgaagtggatttctttaagaaagaaaaagagactataggcatgaaaaggccacatatatatttggttagaattcactcattattatgagttttcaattgaattttagaagcttgtgattagtatgagtgcataaaaactagttgtgttatctcgattttctttgcatatagcatttcatgctgcatgcacatttggacattagagattatagctttgtagaaccagagctgttctgtcttgaccaccacctgggttgaagcccataaagagaaaggctgagagatcggttggaatagaaagttgctggtttcctttaggggactctgagatgatgagatccggaaggaacctaaagccctctataagcagtcccaacataaagccagaataaaacagtttgatttttttaaccatttcattaacttttttttcaaaagtagtaatgttgatacagttcaaatggcatcctggtgcatacaacagatacatcccaccaatatccattccccagtatcacatcatagctgtgggtgaggggatccttctcaaatctcagctgagacatttgccctgcaagcttactctcctgtttgggagcatttgattttgcttttcatgcatttacaggaacgtttcagatgtacccctccataagctgtacacaactccacgaagtcctactatgtgggttcagtaaatatctttctaccagtaaatgagtttgaaggggtcagtggaagacagcttgaattcaattgctgtggcccctcaacagcctgattgttctttaaattaatgtatccccattaagtgtattgtgaccctagactttgtcagaaagaggagcagaggaggtgactataaggaggacctggctgtgagatgctgagatgctgagctgcatcccagctctgcaagtagaggatttcatctgtctttgggggttggattatgtgtacctttcggaaagtttgttttaaagggcttatgatgttgtgacactaaacagttcattcctacgaatgccaccccctcttcttgagcatatggtaagcactaaaaatgattactgaataaatggataatttaatgtcttttggaatttttaaaatgcatacattggccccattttattctcatggtataaacattgaggcttttctatttgggataatggattcttctaaacctaactggtttagggtgacaccctctcagacccttttcagagtgtgtggactgggtatttggaagcagggccacacaagctgttctcatcattccattcctcttgcagtttacagcttcatctgtttttcttttttcaatctaagatgctcatgcttctttatttgtagttaattgtgtccaattaagtttttttttcttgctctaccagattctcggaattgtcccaagtttgagggggaaaaaaattggttagtcccatttcttctggtgcctcctgagccctgcgcttgggtacaatgaggtcactttgttgaaggattaactttatattacattcttgcagagtagatgtatgtccctaaggtatgactacccccactgatgaaataaatataccattctttatgattcctccctgttaccctctctgttgattttcagagagtttatgaatagtcacatatttatacaactggccaaaagtatactacttatttttcttatggtctgtaataacctatgcaaggttattaaagggtatacagacccctcttaaagcatagtttcttatgtcattactttatacaagcaggtcaaattccatctcagcaacaatctcttgctcttaacctttttctctgattatataagtaatatatgttcattgtggaaaatttagaaaattcacagcaaaaagaacaggaagaaaagcactttaagacccgctacttagaaataactactatttggcagtttatacacagacatattttctttattctatatatgtttgtttaaaaaaagtaactatattgtacacatgctcctgtaatctactttttaaccaagcaatatatcagtaaatattttttcctatggcattgcttttgaggatggcatcatattctattccatgcgggtgccttaaattaaccatcccccacttcccagatgtttaatatattttttgtgggggcagttaaaataacagtctttgtcagatggctcccccacagtcagtaattggtttactttttttctctagtcaatgcaatcagataaatcatcaggttcctttggatttaggacagtgagctttgtctagcatctttaatgttagctttgtctgcagcactggacgattccattgtaatattcaatacctgtattgagggcaggttaacttgtttaaagctatgaacagacagcaaatcataaaggcatgggacataagttaaaagcccttgccttactatttaaatatttcctctctcatagtacacgtccatggagtaaatccttatttttctttgaataatgagtttaatatgtctaattcaattactctgtggcagccgaatgacttctcttcagctctttagctattagttccatatgatatttgaattggttcttttaattgctgatattgtcggtcattcctctgtgagctggccatatagccggagaaacatctctctccccgccatacatcagacagtcattcaattaacaaccatgaatttctagacacaataggaattcattatgctaatgattgaagtggtggggcaacaattcaaattttactggtatcttagactgaaaagtaaaaccaagaattagaattttcaggatgctgaattatgttttcagatattaaaatgatgcatttaattgtctaaagctactatttatggttaaacatttttgttggcaattagcattatgggtgggggtggatattataaataacttaaaccttggtgctcattcctgtctctctcatgcatctcttgattaaatacagtggattttacaagttgcagcttccctgcctaaagaattctatggcattttctctacaagtctaatttgaaaaaagaattcttctcaagggtttagaaagtaattcataaaatggaaggaataataaatattgtgccttaactcatatactagtatagatagaaagatttgatacacctgggtgtaattttagttaatttccacaagagacaggttgaaagtttactgtttggaaatggggggagggttaactaaatctcatatttgcaaaaatgattacattatcttaaatgaaaatgccactctattaatgacttcaataagcattgcatttgggggaaaaaaatctttctaataaaaagttacctaaagttcactctaacttaaaatatacaagtgaagaaaaagtacttactctgatttatgtgtcttttggaggtgtaattattggctttttactcacctgtgtaaaacaatgtacttttgtaaatggatttctggccactttatgcagcttttttttttccttacataaaaagtaagcactgtcaatcaaggaattttaaggtttatttcctctttagaaatgattgatagccttttagatttacaagttgacaagttaaagagttctattggtataattatgtactaaattcacagtctttcaatttaaatgtccttttaaaaccacaagattatcatacctgtattttgaaaagtgggccagtcagtttgggttggtatacaaattgcttccattagccttgggacctatttgaatttaatacagttttttaaagttagtactagtatgaatcttacttttaaaatttaggttaatggaaatgcattttaagcaaaacgtgtggcaacttgttttttaatgtatagctaaatgtcagaactacacagactgtcttttttattcagcatgtgagaaaatacatggttgagcactttgattacactaaaaaagacaagaaattttaaaaaaacacccacctaccccttacttagagaatatagggatgtggaggctatggataggagctggagctgccgtgttttccatctccgctgtttcacgtgagacagcctgaagatatttcacataccagggagaaattttgaaaatgatagaccagagtccacttaatattgtgtttaatttaaggatgctttaaagagtgtgtagtcaatgtgcacacagcaaggtccattgtctccaaatgttattccaggtttgctcttcttttggtgttttcaaggattattcttggagactcggctgctctaagctagtacttcacagatgctggtcccaaataatatcaatgttggtgaaaggatctatcatttcagatgtgagagttttgaatcagggcattttcaatacccatccctttgcagactctctcaagggtggcactggctttccatacctcaaagattcacttctactcactctcctctactctcaccagcctcttgcatgcttatttgtgctgagatattgtatcagctgaggtccgctaaggattttgcagttaagcagatacttttaattctcctgctgtttacaatgtatagataccaccaggcaagcccttgagtgcttttacctgagcaactgaattaaagtggatactaaaaacctcacatcaaataccattttactttctatttatgatcatgtaaggagtgtagaatttggccaaaggaacactgttcaagacctactcctaatgttcttttgggcgggtcactccccaccgtggtataaagcagatggtggaaagtttagccaagagatcattcacacaaccatcttgtgatccaattcaaaagtatcagttaaactttggacttcctggttatttccacaccattagtgttgcaagccatgttcagctttatttcttgaaaatgtactaattgtgtgacttctttattgcagcgctcaacgaacccaccatcgattatggtttccagaggttacagaaggtcattcctcggcaccctggtgaccctgagcgtttgccaaaggtgaggatactgcctttttgtaattcctgaaaatttggacttgagcgatttgcagaaaactctgctgctgataaaaattagttcacaggtaaacaactcatatttttgtgttttgtgtgtttggtgctgtaaggtaagcaataataaaagtagcaagcacttatgtgccaggcaacactgtgcttacttttatatctgttatgccattttatcctctcaacaatgctctgatgttggtattattaccattcctattttagaagagaaaataagcaaggagagattaaataataatttgctcaaggtcacatagcatgtaaatcgctaaaccaagatttgaacctatgcagcatggccctagagtctgggctacttaatcgctacatcttaccaattctcaaaagaaaaagcagcaccaaatttctgtctacgaggatccgtacttagtcctggcaagaggagaatagttagagctcaaaatgttttggtagatcttgagattgggcaaagacaacctctcttctcctaaggcattctacctggttgggaaaataggcacaaatatgagagaaattaaacaaaaattcaagacagagtcatatatgtcaccaatacatcattaattgccagtgcagaaagaaggaaactgacctttattgactattgcatacctgttgtgaatgtttgggatatccccatccctgtacctgaggaacttgggctttatgtgggagagaatcccaaacacaactaatcataaaaataatagcacattaaagaaaagtgcaaccaacgttctgtgaggactcagaggagagggcagttaaatgcgaaggaagttcaaagtacagaattcgttgagcttgcattcactgtttactgacggcaaaaagcttcatttattacacaagtgaaaactattaacattaaattgaattagtagtttcaaggactctttcttgccacagtaagtctagagatatgccatttctaggtttatgtatccgtgtaaaacacttgcaaaaatgaagttgccatccttcttagcttggtgaacctccttggagtatcagttcgtcatcaaatcctacccgtgtgctggctgcccttgtaggcagggccacctgtcagaactggccctgtctgggagaaatccacccctcaggccactacacagaggtgaggcgcatggagaggaggagcgctaactgctccggagaggaaggactgtgatgagcaagggcctgtgtcctgcatcttgactttgagggaaaaacaccttcagttttcagagatgatgccttcagtttcaagcttcaatttccaagaacaacctcacttccactgaagtgctgtccttccctttccttttccaccccaatttattcttggtaagcaattaaatcatctacaggttatttaatattatttagtagattaaataatctaactataataataaacagcagtctccacccatggtatagatggtctgtggagagatttaccattaggttcctctgtctagcaagaacatggtcccgtgcatttcctatgggacaactggtaattttatagcacgatgatataaatgatgtgggtctgactaatggtaggtgccttagctgtcttcgtgctagaacaaaggcaggggtacaatgccagattcttcccattgttcccagtgaggaacatttgggcactgtattcactttatatttagcacttgctttaccatttgatctctagagtccactggaggtattgaggagagtcaggttggacaaagtggaattcagacattggccacttgctagctatgcaacctaggtcaaaattgtttacctctctgtgcctcaatgtcctcatccactaaatgtggatggtgctatgttgtaccttttcgagttttattacaatgacttatttagcagccaacaaaaggtagctatgatgatttgccagttgagtgagaatgggacccttgcttctgagagctcttccacccaatctctgcagagcaggaaatcctaatcctggtgagcagttgaacatgtgatttctcctctgtgcctcagtttcttcattgataaaatggggataattaatcatgctaactcataggggatcatgtaaggataaagaggtcatctcatgggtgcccttggcatagcatctggcccatagttgccactttaaaaatacttatcgagcagtggctcatgctggtaatcccagcaatttgggaagcagaggtgggagaattgcttaaggccaggaattggatactagcctgggtaccatcacaaaaccctatctctacaaactaaaaaaaacgttagctaggcatggtggtgtgtgcacgtagtccaagctacttgggaggctgaggtggaagggctgcttaagcctaggtggtcaaggctgcagtgagacatacctaccattgcactccagcctgggtgacagagccagaagaccctgtctcaaagaaaaatagaagacaaatctggtttaatggttgaggtctacggaaaccagacagttctttttcttataagaaaggaaaggagagaaatgggaatctagggttgagttttgtgtacttacttttgaaaacacttttatggttgcatgttatgttcagaaatgttgaacaaatagcataggcacgtgtcactttgtccctgatggtaaaattcccaacccttttttcctgggtttggaaagagtaatcaaggacacaatggatttgtgtgttaaggaaacactccacggcttgcatctagccacttgatcgtgcaagggctggccggagcccaccccaggaagctctcagtgtgactcagagccgagtggctgtcctcttggctttgaatgttaaagtggagcgagagttcaagggcagggtcaggaagtggcggatggagccagcacaaggtattcctgtggacttgggagatttatactcctgctgtccattgttagggagataaaaatgggctgcgcctttcttaggatcatggtcagtgtttgtcaaacaggagtgtttcagtgagctatggaccacacaccttaaaaaacaaactcctctttattaaacccatgtgtttgtgaatagacaaagctagattcatacaaccacccacacattctgtcaaatgaaactgctccaaagaccaagcagacagctttccataataatatgcctttgtatacaggcatgtgctttttcaaaaaaacttggacgtgctttgttttattggagtccctcctgcgagagaggctgggcagcagacatctttaccatttaccaaataggaaaacgggagcaagcggaatcctgctctgtaaattattttgtccctgaaagtcaccatcagtgatagttgctgtacacacaaatttaaaatactgtgattatgctaaccccagatgttttttggtttcctttttcatatacacagggagaaaagggcaggctaaggtttttaaatcacagcattctgttctgtttcatacagtttcgcctttctctctggatcctggcaggaaggggaggaacatgtgaccaactttgaggtcaaggttgacttttcttataatttagaggtggaggggatggggaacatggtcgatcagaaattctgagatgctgatggccgcagtgatgcaatccagacacattgggcaaggagcgctctctgtgttcaaggtcagaaatgtctccgcccccttgcagtttgttagttgccttcgtgagtggtcagtgagccttagccctaaggcagtgagtgagagtgagccctgagcttagctggcgtcaggcgtgtcagctgtgaatcctaggaagcaaggaatgtttacttcatgcctactgtgagcccagcactgcattattaaggttttcgaagatcatagaggccaagagagtgggctctcaagtcagaaggatgtgcgttttggaaacatgatcccctacttggtacacatgactcaacctcccatgcttcaggtttctcctctgtaaagcagctgcctcacggcattgttgtcaggtgttaatgagataatttatgccaagaggcatccctggcatctagcaagactccagtaaatgggggccactaatccctgcactgtgggtgttccccattttacagatgagaagttagagtccccagagatctgagtgacttgctacgacatcacagctagcacgcgggaaaactaccattcattcaaactcaggccctcagggtcggtagcctcactgccgtcactatgttgagttcccacttctcctgccttgaggtgtctcctctgcagacacctgacacctggcccccatccttatgtagattctcaccagctttctctcatttccctactgagaaggcttggcctggggaccttctcagggccaatgtcttttctccaagagccagcccctcttttagagaaaataaagcagtttgggaaaagtaacaaaggctgcatttgtgtattttgctttatggagctgaaaatatctggtaaattgatccagtgggagtaataaatacacattactttatcttgttcttcatgtcctatacccctgagccttgatagaacaccaccacttaatagacttaaaaaagagtaattacactcattggttgtgtgatttttcagccctcccagccctgcctgaccttctaatttagctcaccgtgtctaactaatgcatttatattcatcttttatgaagcatgtatagtacagaattgacttcagagcctttttcaagctgtcctcctaggtccccaatctggttagtagtaaggagaatgggagctatccatctctatgttggtaggtatagataacacgtagacatggctcaaagcattttttatcctttatgaaacataaaaaaagtatttattacatttttactttaaagcttttatacattcgagcattatttacagctaaacatgcaggcaaaagatgcgagtgtttttaaaatgattactgttaatgtttctgcttgtcagaagtgcttaaattttcctgcactttgtctaaaaacttagtactgttgccttttaagaacaacacatttaaaagatcttgcaagtcagatttgcaaacactgctgacagtttgtgatgaatgatattgcaaaatttgcaagatgtttgtcatttcacacagccgacatattaaggaacggattaagaaacgtgaaacccctatggaaaacaaccatcccaaacaaacctccgccaaaccttgaacccagagagcacaccggaatctctcacccgggttttctctcccaacttcccactcagccagtggaacccaattgttctcagtgcattttctctcaccatatggtctcctcattaccatacactaagagtccatatgggaaacttgtgaaatgaactgcattcattttaactgccagatgagcagccttttgctttgcaagcttagcttaagtcatctgctgtcttcatgttgttatggcaacacagcaccaataaaaaattctaatctactgtaagtgatcacagtattttaagtgcttgcctataactgccctcaaaggggaagagagaggagggttctatttgtccaaggagcaaaaagttgttgttcattccagcaggtgtcagtaaagaagtcagtgacatggggattgaagtaccagtgtggctggctgtgcagtaggttggaattataagggaggtgaacaccagtggggtggatggtgggaaggaggggttgtggacccttttggtgggtctccaaaagcacattgaatgtcaagcaccatagtatctctggcagacatgctactctggtggtgctgtgtggccagcctgccgtgaaggaactcaaggcttccttggaaatacagaggtagcaaatcctcacggtagcttctccttcactggcattcgaaaatctcagtctctatgaagtggctctccctgtacatgtgaattagtcatttcaaacaccaggctaattaagagtaccttaaagtaatggaagtaggcagcaacatccttaaatataaatcattttcacctctgctggccacatgatatgttgcatctctgtcgctctatctatattgaaagtgaatgtttatagtctcagttcatcagttcacattagcctcatgctgaatatttaaacacagaacaatttgaacacaccatgaaggaagacagtgactgcactttcatttggaacagcaagggctcatctaataataatttagtaaatcagccatttagtggctcagttgtgcactgcattgtgccaaatattattcacttcaactgtacacttgcaaaattgaaattcagactccagtcacaggcactgtttttgctcagtggagagacgagacctaaaatcaccctccctaaagagcattcatgtttagtgatttatcataaatacagagctggggcaaaataaaactggagttggctgtatacaatgtattctaattatgcttttattgttttagtctttatgcaaagactatcagtaattcaaaacctgcagttgcatcagtgaaaatacaaataagatatctttgcataaccacgttgcctcctagcagaaagggagatgactaagggtttcagcaaaggatgaagaacgacttaacatcttcatcttccacactgacactagcctctctctcactctcactatctctctttctctttctcgtgtatttacttttttaatttgaggaaactcgattaacattatatcctgaaatgaaagtgaccctcctcagacgaaaacacagaaacaaatggcaaatcttatggtatattcagctcttagaaaaaacatgcctgagtttgattccaggaaacatctctgcattctcttgtcaaaaacacaagctatggaatgctgtccatttcccccactctctcctgtatctaccagaaaacttacaggcagattccatttccccatttgataatatgctcagtctaggggcttggtatccactactacttatatttctttttatccagggagtttagcctggatctgtgtacccctgaaattgcatttagaattcctgtgtgtgtgtgcgtgcatgtgtgcgttatgaacatgcacacacaaatgcctgcacatgtaatttatctggggaaagaagttgtagcctcagtaaaaaggccgatgacccccatgaaagttgtaattctcacctctttaagttatttatctttagctgacttattttgcggcaaatgcttctgcttgtcattattgtttccttcccaatttagagatgaggaaactgagatttatacaggacaagtaaccttctcaagcttatgcagctagtaagtggaggtttcctaacttcccatacttcctaaccagtaatccatttagagtcttttatagagttttgaaaataggattatatctcaaacatagcactcaaggcacgcaatacacattgactgtaagaatgcatatattttgccagagttccttggaaaataaatggggattattaataatattgctggttattgcctgataagcactaactaaatataatctactaaaccaggtgttggtattaactctgttttacagatgaggacacagaggcatgtgtttacgctgctaatacatcgcagaacatggatttgagccaagtctattggactccagatccagagcctatatcccctaagcagtgcctcccagaattaagagattttaagaaaaaaagccaatttacaaaatcagtcttaaaacccttccagcctggttagggaaggaggcaagtggtggcctagacctgaggttagctcacaaagggctgagctaggtggaagcggcaggaagaattcacatgtaaatgcagacaaaccctgggtaccatgctttccctctttagctgcagagtcattgtgggagggacttgcagtaaccgttatccaatagctcagtgctggaactctttcgagttcctttttagcactgagttcttgatggggaggactaagggtaacttacttcatatcataccctgcatacaggggcattgaacataattactcattagttcaagggtaggtgacaggagaaccaagaggcaaactcatttctacctccagccacccaacatcctccccttaaagactgaagcccttaggaatggagatgcttggaggtcttaagccttgctcactattttcagccctgagtaacacttcagtggagcattagagtaataagtaccaagccccaacagtcttgaagcagtggattttaattgcagttatactcaggaccatctgtaaaggcttgagaattatcatttacagatatcgtttgtctggagatacatatgataaccgatgatgttcatgctcaacagttgaagaagcaaaagcaaattatatttttgcctcccttatgtatctatatagtatgggaacgtgtcactcaagtttccctatagtatacgtccaaaaatataaatatgcacgtgcatttgtatacacacacaccaaacatacaaacacatccacgtatgtgtacatgacaaatacatctctttgtttactgagcagtccctctacttttaagctcggtatttattcagccttggctgagggaaagaagccacagccaaaagacaaagagaaacagaagtagttaatttttggctttttgtgttttctaaaagcccaggccttggcgacttaaaggtgacttaaaagattttcaagggtaattttgactctaggccgtttttgtttcatgtgctgactttacaacctacccctgaaaaaggcatctctgtccagagctttctctttaagcagagacttttatcctgatcagaaagtcgatttccaaggcactcagcaggacctaacccacagcgttggtcttaaaccagtacaatgaattggaataagaagatcccgccagaggttaccaagttcagctctgtacctccaagcaggtcatagtcaacaagggtgcagacaccatttttcactgtatctgtggcgggaagcaccccaggctcccattcaccaattaccatgacaccatttagaagaaaatgccaggagaccaaataaaaaaaaaaaagggaggggaaagccattgtcataactcttctcagaaatacctggtttcacaatttatacttaactgctgacacttgaaaagtcgaacattttggtaaaatgaatcaagctgtaatgtttcttttatgagatccccttgcaggaaagggaagcttggcacctcatggagcccaagcttagttatccatcatagtaaagtcagctgtcctagccagcttctcagaggtcacacgatcgaaccaacagctcttacaactatattattgcttacgggacagtaattgaggcaccagataaaaattacctggtctaataggcagcgaacaattttcactcaataaaattatgagccaaatcatttatttcataacactctggctaatttatttgttgaccttttaatatccatagctcctcagtggtattaactgcaactcagacaaaatctcttgttcatttcactttcattgattttttttttccattgtggcaataacagttgcttgaaaacagcctttctttccattgtaaaagtcaatcacgtaagttagtatgtcttacgttgatatagccgcgttagcttacaacctagtttaatttcatatgattcagagtctcctataccatgtttttaacaaaggcaaggctttctggtttacctccaaccatgccgcatgctggttcataataatatgtttgagaagtaagagggctgtcatctaatctgaacataaaatcaactttaaaatcagaggaggttcagaagaggtcctcctgctgcattttctctagactagaatgtttttggtgccttggcctttggtattaatagcagtagactctttcaaaatatttaattcctttgttctggaaatgtctagagatttttactgtggtttgaatttcagtttttaaaaagactctgggcaaaaagtatgcgctagctagaatgttctgtagggcaatctaagcttcagctgaatcttcttatatactaaaatactatgaagtctttagaatgtggggttgtaaaatataattgttatacatttggcattttatgcctccctgcaaataactacttgctacctatacctcatttatgttcctcctttccatttcaatttactctaaagtggtccttagctataatgagaatgcccctttcaacagaaacatgtttaattatatccatgctaaatgtaagtgactcttctcagtcatagggcttctaaggaaagagtgtttaaagtgtgacactaaaggcttctaatgatctgcactaagctctatttcaagaagtttatattacaagaaaaatgaaaaatttgaggaatgtctcagaggatgggaaactaaacggtgcccaagtgttattttggtttgttttactctttccctcactgccctcattatactgattttttagaatgcaaagtctaccattgtggaattttccatttggctgaataaacacaaaggaagctgggatataaaactaccctccaaagaaatacatctcaggacaactagtatttattgcattgtacatccagctctgcaggaaatgggctgcaagaaacttccaatcaatttctcagcattcggcctttccaatcagtaatgtcacccaggctttcagaagtcagtggggaaagatccaggacttaaagtctaggagctgaatgcacacatcaaaatctgggtcctgcagtaaaccctatacgaaggaaggcagtgaaatcaatgctgatttcattgataggtgcttatcatctctacatcaagagtgattttctcatttcacttcattgtgtgttgctgatatttggccactatattttgaatcccctgataaagcaaagtagattggtgataaatgggtatcagggaaatgtgcagtgacagggaagtattgtgcttctttctcagaaatcacccaactcaacttgactttgattatggatgcttgtagttttttttttctgtttcaatctacattcctgaaaacatttcctatttgggtaagcataaagccaagcacagattatcctctgaaattactgaagcatccctgggctttaattttatgggcggagttcccagagtctcaaaatctaatgctgaaacatgaaaattaatgttgtgttcgtgtatgggtatctatcagctttatgatcatcagcctatatgtgctatgaacaaaagaaagttcagactatcttccctgctcatctggggttgagttgcccaaaacattgaactgggtttataaatgggcccagtattggccagttagacaacctttcccttcactctaggaggctagatgtggccagtgaacttgagcttattagctatagatttcaggtcaaaggctaaagagaaggactcccacagatggtgaataatcctaagatttttaactcataaaatagaagatgagttaactatgtctgcatatttgtcatgatatgcctggttcccaatgtgtctttctatgaatgtgcaaatacctaactatttccaagggcctaagagtacagctaataaaaggctgaggaccataaggaccaacctcatgttgctagcagcctataacttgagataatgtctgtactagacatgattcattgtattaatcacaaaattaaaatgtaagtccaagccagcaggaatgaaagagcaaattcataaaaaagtgacataaaaaaactcacagtgatcaaaacttgacctttgggaatttatatattggatttaagagtctgtagctaaatggaacaccaaatttaagtcttctacttttataaaccatgccaaatatgactttgtcatttcatcatacaaattaagtgtgtacttttaaaaatcagtaactgtatcttagaataacacatcaacatgaatttctcaagacttgtggtttgctaaacattatggtaggagcttagataaggagattaagaacctatcactggcctcaaaaagtctgcagtctagctatggagaatgatgactaacacacttcagatcagagcagaatgacctctcagtatatacttctgtgctgtgctgggtgacacagatggtcagcactctttttcagaggaaatagagatattaggagctggggtatcagtgaaggtggaattatttctgatagaacagtgtgattttcaagagccaggctctgatgtctaacaggcctggggttgaatccatgctcagccactagtcagcggtggaaactttgggaaagttagctgacctctctgagtgtcagtttcctcatctgccagatagtaatagaaagaataccttaagaggctttctatgaaggttgaatgagttcttgctccactttcaataaatgagagtgatctccttcattaccataccatcacgatccccttcagtacgaggcttcagaggatggagagaggcattgtccatgggcacagattgaagccagcattccctccaaaaaaaggggaaggcaaaaggagtgaaggtatggagatagaaaggagccaaatgttttacttctaggctggggaggacaagcatagagagcagttcttcaaatacatagggagagatgactggacaaagatggtaggaccaagtgatggcgacaatcttttgtgactctcatcaaactttgtaggtcgatgctgggaagataatgtgccctgaaagttgctggagaataagatccacatatgatgacagacaagggcaacaagaagctcaaacaatatttgctaattgggttgcaaagtagaaagtaaagctgaatcttccctttatatttgtagcccattcagcatttttattataaagcttccaaaatataagtaaaacccatgccagctacatttgaactgtttcttggaaccccattcctccttcggtctccctaacatttctgtagactctaaatagagtaagaataatgcatccacatttttctccatagaaccccactcacataaccatcaacctatggtcatagcaagacaggtgaagccacgttttgatagtgagatgaaatcaatcagtgaaaagtagttgttgtttttaaggagtaaagcttttttgtatctttaagagagaagaaatccaaggccatgagcagaaaaattgtctgactcagaatgtagattggagaacaaacattacctctacaaggagactctggggcttttcaatatttaggatactagtatttgtctttaattcccaaaagggatttttaaaaaaaaaaaatccaaggataggattaattatcttggaattgtctaatatccactcttatgtttgaaattgcaagcagggagacgttttaaacattatgaaaagaagagaaaatctcccctgacaaataaatgccttgaaacattagatattagtactagtcaagtgctctttcttttcagaaatattaaaattgcatattaaaatgaaagatccttagactgtgctcctgcctaatgccacaaaaaataagaatttaagaacaattttagagacaaaagattatatgaaacatccagctcttccccttatgggaaatttctttttttaacatccaaggctcaatcatttcctaatgtgaaattacagatttttcaaattaccatataaaactgcaaaaaaattacacttgtgaccacagaagagatggcatacactatcaatttgattttaaaaggcatacatcttttatactacctgtcatttttataatgccttttacaaatttaatcaatacattttaacattctatatactttaagtgcaatatacaataaatattcaagtttcatcttaaacatgctttagcctttaaattgttaaaactgcagtgccctttcaatctacttacataatgtcataaaatatacatttcaaggtaaatgaagtcagctacttcaatttagtccctcaaactggtagtaaatgagaggttaacactatggtgccaaacccattattgagtaaatttagcaccttggacagctctgtaaaatctttattgctttcctgacctgctcgtcatgttctgtctgtgtgttcagtggctctcagctctgattgaaaggcaatatattagatccccaacacaaacacgcctgggggctagttcactgggagcgtaatgacatggaggtgagagcaattttctggtcaccgaaatccaagcagtttgcaggtccattgcactaactcatggaggacccagaaatttcctttctccttcccatttgcagaaatacctaatagaagccaaatcacatgggcaaagctcaaccaagtctttcttaagtccttacaagttgatactacagtgaaggatattttttaatgggtaagatattatttaagggtgtccctttcaagacaagaaatccaggttcacactcctcaaatccaagactgctggcctgaagtgatgctgtactgatgacctacctatggcaatgtactcaatgggaaaacatgccccagcatggtggatcaaagaaggcagcatcatggatcaaagaaggatgctcctttaggaaacaagatccacgtgttttattctcaaaggattaaatggggatgagagctctggatatcgacataaggagaaaaaaaaaagtagattttgtcattgaaaaactctatcaccaaggatatataatatatactgatagatggtatgttttcaggcttatgaaaacttcaaagatcttggagtttaattttgaacttccctcctccctgcttctgtgaaattaattaaaataaggtacactgctctaagtcctcaattatagtgttacaagagtgaagttcacaagtgcagtttctttctgtgcctcatcacgcttttgacaaacgggagacttgcctttttcccccctaaaatggaaagaaaggaaaatacgttccctgccaagccccaacactggcataaatatttatttggagaaataaatgaacataggcctagagaagtctaatcttagtaaataaactcacttgatcctgttttttgttttcatctttcctaagagccagataaagccaagaggttttagtgaaggcaacacaggctgaatttgatctggggatagggtttagtgtgcccgtacaatagtaaattattaactgctgtggtcagacactactacagcaaacaaaaagtggtaaattagcttgtagcttacattaaaaaataaagaaatgatttcagatgtattggttcaaatccctttgattatataatgttctttactccctacatgaaaaataactaaactgttttataaagggggtctatcagcttaaggcaagcataaatgtttattgagaactgaaaaccccactatcttatttttgaatttaggacattagatatgtcataagtagttactgtagtatgacaactactttatcttatattatagagaatttaaaattgaaaaatgctaatatgtatctaaaagcttgtcatttcaagagttgttcaaggatttttgaagaggctatgatgacagcaaaatgaatgcgattatctccctattttctgatcagcgactgcagtctgtgaaaattgaacagcactgcttctccatgtagaaatctattgtgtaaaatatttaaagttacacttctgtttgaaactttacccacagtcaaaaatggtaaacatatcttcatgcaaatcacctctgatgatcctaccacacccttacgtttggttctctgacaagcccctaccttttacatgcatcaagcttaactttgcttttcttttcacattctagtggaaatgaatctgaagaaaattagggaaaaatgaagagagagatttcttttagttagaaccaaaaatattagcaccacactcactttgtagagtactccctattattagaaccaagcatgcaggctaaatatggaggtccacctaagtaaaaagagggagatatttttccttcaactggaatgagtagccaagcatctatctaggatgagaatgaatgagcaaatgggggaaatcacacaatactgaaatagcaaataattgctattaaagaaatagatactgccagtaatgaaaattggtgcagagggggcctctgaggacagtagagtcctttcataagagtttttgacaaacagtgcattgcctcagtatgtgggtttcctacatcaccctcttatattatgtctctaccatccaagagagataaacaaaagaagtttaatactacatgcttctagtagctgaagattgattggaaatccctcgaaaatgacctgtctgataaggtcatggttactggaataagcaattaagtgcaaaataaacacatcttagggattcataccacgactgaatgacatcaattgtagtaatctagtaaatgacctaggaattgtattcagcaataaacatatgagtgctttatcatgcctatggcagactattgagtgatgtattttatctcgcagtaccaatgatgctcaccttttgactcaattaagtgtgtatgtgaacagggataaattggtgatttaacacccttctggggttccccaagctacggcctttatagcagtgccttggcaaagtatggccagagggactggaatgtgatcatgtcaaaagataacgacaacctgccttcactcaaaggattgtatctgcttttctcttgacaggaagtaatactcaaaagggctgcggatctggtagaagcactgtatgggatgccacacaacaaccaggtgagcgctgtgggtgtctagcctgtgtggactgccacatgcaattaaagatctcagattcctcatcgtaatgagaaagcacaaacaatataaaagccatgtgcatgagttaagagtataagtaattcagatataacatgttgcaagatgattcaatcctcttttgtaaaccttttattgccctttccactgaatcattttctgtatgagaaaaggtactccatttaaaactaatctttagtgggaacatacttcctaattgaagaggagagttactggtgctttattttatttctctcaggttttcaagcaaatttaggaagagaaagagggtttaattttttctccaaaaagtatagcaaggcctgaatagtattgtctgcttctgtttcatagaactccatgtataagattcacatagcttaggaaactgagtctgacaaaccattcactcctttttcatgtagcctgagtcaatgtctgggggacacagtcccattaatactcagtaatgcaggtagtcatctacagccttcccttaacatcaataggggaggtgaattgcagcctctcttcctctccccctgggtaacctcagacttcctacatgttattgggaaggatggaaaaccccatggtgctgtcctgtatggactgtagggtagtatgaaggtatagttaagataatggactttcaaagtcagacaaatgggcttatgaatctcagctctgttcttaaataggtgagtgtacttcggtgaggtttttgactttctgagcctcagtttccccatttcggatacaggcatgatgatggtgagactaatataacaggtttgtcatgagggtcacagaagttaatgcagctgaccattgaaaaccctgagcacggtacctggcaccgaaaaaatggtattattgggaatatgactgggggcagctgaaggggatattcctttgacttttcaggaaatcattctgaagagagcggccgacattgccgaggccctgtacagtgttccccgcaaccacaaccaactcccggcccttgctaacacctcggtccacgcagggatgatgggcgtgaattcgttcagtggacaactggccgtgaatgtctccgaggcatcacaagccaccaatcagggtcagaagcttgcttttctcttccctccccaaccttaagcaccccatctcctcatttattggtcatgaacaatttttacattaaaaaattattttcatcccaaaagggagattcttagtttatgtgtataagatattattgtacaatattggtcctagctatcattcgggtaatctaatatagagggctagaaaggatgcatgcatttagccatctctctacatttgacttttcaccataaaccatgaatgacagatcacagagagggatggaattaaagttttgagggcccaaagcacatcattcttgcccagggaataggaacctgttaactccagggtacatctcttagatcgggatttatttctgctctaaaatgataatttataggcccagcattgccatttctcacggccctgctaagtatttatgatctcctaagaaatgtgtcttttgctcgcttcccattttaatcacagagctagcaccaccaacccacgcacatgaatcacccaatcccttccctctgggttgcggcgacggggccagaaacagagaccttcctttccccgagtcttccaggattgccaccatctgaatgccaccctcacctccggttttgcccccgcccctcaggtttcacccgcaactcaagcagcgtatcaccacacgggtacgtgccgagcaccactccccagcagaccaactataactccgtcaccacgagcatgaacggatacggctctgccgcaatgtccaatttgggcggctcccccaccttcctcaacggctcagctgccaactccccctatgccagtaagtagagatgcatatcctgcgttcctgcacgtttcgctagaagaacttggcatcatgccatgtggcccagtgggcagggcttctcggtctgaggccccccatctttccctcctgtaaggcactcccctgggtgatggtgctaaaggcaccatcgtctccagcaggaatctccgctctccagtgctcaccttccttcctacaaagtctccctaacagtcagaatgttgctaccatccaaagcagctgtatgaagtcgcttcaggaacccatgctctgagttagatgaagacgggttgactcctgcttctcccagttactaactcccacttctaccagttaccaccagctactcaggaaactgaggcaggaggtttgcttgagcccaggagttcaaggttacagtgagccatgattgtgccactgcactccagtgcctgggtgacagagcaagactccgtctcaaagaaaaaaaaaaagcaaacaaaaaaacccccataaacaatgaggacaccatatttgtcatctacttaatcccaaaacatctattagtttcgtcttgtttcacctgattattttagctacataaaaggaatcaagttcatttcctctccaagcctcaattttctcatctgtaaaattgggaaggaactagcacccaccccatccagtgttgtgagacatagagaagatagcgcatacagtgagcttgtcctgatgccggacacatggatagaggcacatttagtaaatctaataatcatagtgatgcaaagataataacgtggtggtggtggtataacatagtaacaatagtctaaaacctaacttctctcccttcataattattcataaagcactcatgttgaaaaattccaatggaataaaaaaaaataagacattcctctggtgaacacacatatgactcctttattttttaatgcttggatttttcccctttgtttgtgtttggtgtatatttaaaacaacaacaaatcaaaacacttttccagaaatctggcaagattaaaaaaaaggaaaagaaaaccatatacacataaaaaaacgttctttggtgccttgtctctgccttaaagaagtttgcctacaaaaacattttggtacatttatattgcttctaaagaacctcagagaactggcctccttatctataaaatgtcataacccgtgttctcacaatctcttgatctcgctctgactttgaagttcatcttggacattgcgagtgactcttctgatgtgtaaaatgtggccaaactcttagatatttgtggaaggatagataggtgtaccattaaattaaagaatattcatgatttcttaaggagtcttggctaaaaatacagcaaatgatgccctgtctcatagtgaaagtatggattgttctagttctttgaaagaggaaagatcattcttgccctgtaagagaagttatttctgaaaatgtacttacagacttttactttctgggtgaatttttctgctcaaggtccacaaaattacacatttcatcttagtttggaatcagcagtttgttgaacatttacaactccccaaataatctgcatatattatgtctgtctactcacaagtcaatgtttaggatcagtttcacattagattttgatttatcaaaagattgtttctcatagagatctataatttcagtgttctcccatttattcagtcagaaaatgtttcgatcatgacctgaaaattaaaagatggcattcttaattaaatcaataaactaattgctatatggtagcaattcaatttaggggcttggaatgctctcctccccaagcctgtgcagacactcagccgcttcagcctgagattgcatctgtcagactgtgaaactttgaacatttaatttccattaattgattttctcagtgctcacaaacatagtattaaattctcaaatatgctctcagatgggacggctttatctgcacaaatgcaaataaaacaataaacacaaagcccagttgatttgaatttttgcctccataatatttaattattcataaagcactcatgttgaaaaattccaatggaataaaaaaataagacattccactggtgaacacactttctggtgtggtggctgataactaataatgttataacaaatggagctgcttgactatattttacctctacctctgttaactggccccccaccccaaaactccccacctctaaatacacataatgatcacatttgccaatgagattaattgccttcctcagtgaaccagcaggatttcaagtctacgaatatttaaaaatcaaacctccagtgcaggagttttgcaatttaaatgggtgttattattgagcgtattttcacagttacaaatcctaagagatgtataaaaatgctggcctcattaaaagaaaaagtacagtttagaaaatgtttgtgaaaactctgaggatggtggctctgcattctgccccataaagcactcagtgcgtgtggattgggtagtgccttggactgattagaaggggtcattttcccctgatggcaattgttgcctatgaccaattggattcccactttgcaaaggataaggccacccaaacagctcctttgactctggtgggctcatgggaacgaggcttttccccctggagatctgtttcctttgcagggtagcttagcagaaagagctccaaatttgggcgtgattccttgcttcagcgcattctagctatggcccttgggctagctgctacactactttctgagtcccagcttgcttcacttcctcggttgtaaaaaaaaaaaaatatatgtgataggccccgacttaaggttgcattgcccatgacaagatgaaaaagacgtgaagattcttgtgaatgataaaacaatatctgatgttttattaagttgtgtgaaaaaataataacatagaagaaatatctaggatacatactttcctgcaggaaatggaggaaatagaaagcgagtgtatgaaaatattagtcttgacttagcgtatgtgaaatctctgtctcctaaagtaaccgagagattattaacctggaacaaaagatgagaggccaggccaagaggatcatggtcggtagagaatgtacgtctaccgagctctttcatatccccaagctgctaggttttctctgagttgccagagttttcccatcattggttatctgcatccctactactaccaaactgtgagtatttatgtaaggctctgatcctactgcttattaattcccaaacattcatgtatatcccatggcggttataaagaatttggaacttgtagagttctgcatttttcacaaatgctgcatgtggcagtctggtggccatcctctcaagctggcttcttcctgttccccctaccccagcctctttcctagaactttagtttaggctctacctgggatgcatcccctgatacctcttctatgaagtcttctctgatttcccttccctgcctccactgagatggctatgttcacctttctcactgttttgtgctactctatccctcataagagggtgttgcacttttgtttcctggcctggaatactctgaggatggtggctctgtgttctgccccataaaggcactcggtgcatttggattggttagtgccttgggctgatgaccaggggtcattttcccttaatgacaattgctgctgatgaccctagtgcctagcacactgcctggcacacagtggccccacaataaacacataaaagatctccagtaatgaaaggtagcacgtgctaagttctgtatagtgaaagtggatgagagcctgcgaattcagggaaggtttgtgctggaagcatcgtctgagcagggcagagcaaggtggctgggtgagggatggatctgagcttctttgcttcaggatgccatgaaaggcactgatttctcctttctcattgcccctctcagtagtgccatccagccccaccatggcctcctccacaagcctcccctccaactgcagcagctcctcgggcatcttctccttctcaccagccaacatggtctcagccgtgaaacagaagagtgctttcgcaccagtcgtcagaccccagacctccccacctcccacctgcaccagcaccaacgggaacagcctgcaaggtaagccccaggccccacctgccaatccagattcaatgccctgacttcaccctcccagggcctgaagcagatgcatcaccattgctgagggtatcagccttgggccctgcctgattctctctgccctcatctcttctgttcctttgtatttgctctcctcaaccctggcccttggcccttggccatactcatctctcctctgctggaggtgctcaagaagtcctctttccaacttcagcaattctgctcaggcccgggatttgcttgggaatactgtttctactgactaacagcatcatttctcttttctcctctttcactccttgtggtcgccattatcagatcagtcttttgtggactctagcaagttctccagtgcagggtctctcccgggactggccttctcctgaagtaggtcactcaaccttcccttcctgttgcctgtgtcagagtgaacgtgtgtggggctgataacagggagggggtgagccataacttgatcagagccctgaagttagatcatcatagaccaaaggccaaagacttcctactgggattaagaaaccccagaacaccactagagtattctgattcatattaaaattgttcaatcgctttcccaccattgcatttggaaaataaaatagttgctaagagttgagatgaccttttcattaagaataaaaggttacccaccttttaaaactgagcacaccatttcttacatttttcttatgagcttagcactctgttgtgtgtcatatgttgagacctgcacaacctcattcattgcccccagcaggattgtgtggtaggtactcatatctgctatttgacagatgagaaaactaaaggttagagaggttatgaaattgcctgacttttaacagctgatacatggcagaagctggcttcaaattcagactgaaacattcatctcctaaatactttattattcagaggtgctaaaagagacatagccagggttcctaaggcagctggtagggagataagattagtaaactagtcaaccaccatttattgagcactgaacagtgtacctggggctgtcctatgcatggagcagattttataccatttaatcctcacatcttcctaaagtatgagggccattatggtcttcattgtgcaaatgataaaatggaagcttaaagagggtaaatacctgaccacagacatagtcggttaaacggtggagatgaatgtaagccccatcagagtctgtgcccttaagcccagccatacaaagtttcccacagtgtcttcccttggtggctggcatctcactgatggaggtcagcctggaagtcagggaggggtgaggaaggcagtgcacatgtctgggatatctcagccctgtttcttatgtacaagtacatgcatatttctacttgtctacacatactgtgtgctggatgctttacactgtgatgagcatatagtgattctcctgaagaccgtatgatgtcagcactagtcccattatacagatgggaaacttgaggcttaatttgatccaggtcacatggctaataaatagtacagctaaactggaacacaagccatgtgaccccagagcctgagcacccgatcacgttgtctttctgcctccaggaggactcttcaaaatactcctcagaaccttgcttgcaaatctgcccagcacagcccagactcagcgccccacagagcacgccgctcttccccactctaacatacagtggcaaatccatcttcttagaggaaagaggaaaaaaaaaaaaaaagcgtgcctgtgcaactgcatttcaggcaatattactcatgatagaaaatgcccacctccacaaagtagagccacccattcctgcaaatctcattctctttcagctaaaaataatgctttgtcaccctcagtacacctccagctggcaaactagggatataatgcttgagcgaatataacttataataggtttaaataatgatcatacatatggaaagcagaaatttaccattcttgagctgccaatctcagcccttgctaaacatagatttgacatcagaaacaagatatgatggggtttataatcagcagttgacgggaagcactggagaagaaaaggcccccactattggaaggtcagtggctctatcataggccaacagtgacagaagtgggcagctcccaggaggcccgatgtcttctcatgccctgtggtcctaggaaggagcaggaagtggttggaaacaggggctgggctcagatcttatgacttcctgggtttcaggagatctggttatcaactgaaagccaggatctggatgagggtatgtgcctgtttaagtcatgatgaaatggcttcaggacagggatatatacaaagtttgtgcatttgtcctcccagggattttccaactcaattcttacccaattacagatcccaaaagtacagagactgtccccatttctctgaataactgctgagtctgtgcctctctgtcacctttcctaacacagggccacagtgtgggaggtttgaggtctgattcagggacacaccttgtgctggattcactgttgtggatgacactgccctttccttctgattgaacaaatgtcaaggagacttttttggattttcccctatcccatgccctgactattgagcatgataaaacaactataaaaagaatggactgggcgtggtggttcacacctgtagtctcagcactttgggaggctgaggcaggtggatcacctgaggtcaggtctttgagaccagcctggccaacatggtgaaacctcgtctctactaaaaatacaaaaattagccgggcctggtggtgcagcctgtagttctagctactaggatgactgagggaggagaatcacttgaacctgggagacaggttgcagtgagctgagatcgtgccactgcactccagagcaagactatttcaaaaagaaagacagaaagaaagaaaatggtttttggtttgctcgtactgtcatataccaaatatccctacttttgagatgtcagtgatggacatacggatggagaaattaaagtcaaattaatgtaaacatctcactttaagctcttctttctgcccactgcacccccaggtgctgtgctggcaggtggggcccacactctgggacttgcctctttagcctctgcacacaatctccagcagggcaaagaggacccagccttaggtgggcaccagtttttcagggcactcttgcttgagccacaaaagttttccctgagaaaggtgacattcagagaattacttcatctttaactttccaaactatttctaccataaaaaaaaaaaagaaaaaaaggatgaaggcaggttatggaattggtgtaaggatccctgaagtgttctattccacgtttttccttttcaatgttacagtagcacctacttcattgggacccacctagttcagaattgtgatcattaagacaggttaagtgactaggaagacttggttaagcaaattgcccatgtcaacaagattagaggtgccacatttaggccatttaagtgttttcaaggcctatttacctccaactaccactctgttaactgtgcatggttctgttttttaaagccgactcctaaaagacctcttccccagcagcactcccttagtctcctccggttactacacgcatatttattccccaagaactaagcacggccatgtcacatggtggtgataatggtgaacacagccactgactaggagggcttattcccagcctggctcccaaccacccttaaggtagcttgtctgttgtccctgttatacagatgcagaaactgagactgaagctaaggtggcttgtccccatttacacaactagcaaacaaggaagcctgggctttaagcccagacagattgactggactatgttaagcccctatgctatattacatttctatattcaagtcactaggttaggcacaagagggctacaaaatcctgccctcaaaatctttccctgtattaggggagacatgacaccaaagtaaataaggaagatctgtctgggaaaggctgggcacccagctgtggaagtacagaggaaggaaagatgaaggagaattcagaacaggctcaaggaggaacaagtgggattcagggccagggagatgggggcaaggggcactttcagcagaaagactgaggacaaccttagccaagaagcagagacagacatgtcctggataacatgcggtgaccagtaggattcacagattctatcatgattccagctggctttgtctcccaggtagataaaacgtttgaaaagttaccatatatctgagggttttttttttttttttttgaaaaagcaactctagtctcaacttctggagcctcacaaaatgtcctgttaaaaaataaaaatatggtagtcaaaaacatttagaatgtggtgctccctggatcactatcttggagatccacaattaaagtctctggggcatcctgcagttaaataaaaatgactatttcatttagtttggcaaacttgtttgcctacagagtccttttctgcatgttaagaacacttaatgtcatatgaaaaactttggaaaatgcaactatattttggatttaaagagaaaaatgcagagatacctctttctattcttatgcaggtgaagtaattgataaatcctggtcccagactacctaactgtgtctgttttccagagccaaagacttgagtcaccaactatgctcagtctttgtccatggagatgtcctctcctttctcctgaagcttatgctgcttagagcttgggtttcaggcaatttaggcctcagaggacttcatttattcaagacagaggcatccccaagaaggctgttacatgccattggaacccccgctgatgtagtgattctaaaccttagccatgtcctggacagtctacgcatgaaaaattaaaaacaaaaaggccagagtaatttcacaaaagtagtatccatatactgatgttttttcttttccaccttgctgaagctcaggctggctcttctcaaccctagatatcatgcagcccaggaccaaatcctatggaatcgtcattttttccatgcacatattcagtcggtgcaagatttacccactcacttacccccctgttcctgattagctcataattcttttttttttttttttttttttttttttttttgagaaggagtctccctctgtagcccaggctggagtgcagtggcgcgatctcggctcactgcaagctctgcctcccaggttcatgccattctcctgcctcagcctcctgagtgattagctcataattcttacacatgtggtggtttgggtacgaccacattccaccctctcactccaaaccctcccagctctgcagaactttgttttgtctttgtttttatcaaaaatatggaaacggtaatgaaaaatgcattgcctctcaaagcaatagttttctgagcttctgtcagagaacatgatcatccagctgctggggaaaatggcagagccaccatggtcttgtgatgtcttggcacatggtgctgagagggtggtgtcctcatgggaatctttatgcactccacttgggcaagttagcatgccaatggcattgctggaacattccaagctccagacacccatccctctcacccacataatcttcagattgcagcacagatataagaaaaacaactcctaaaactcaagatcttcaggcagttttgcagtggagtttctctattaaaagggcctctttggaggtatctaggctcagaggccacaggcagggatcttttcccataatttactcaaccgcaagggttctgcccttggagtttaggaagtcatgattgggatttagagaacagtaatgctttgatattacatgcaaaattctgggtgtaggcaacatgggccttagaatgttccagaaatgctgtggcatgctgtcttgcccaagtagggtacatgaagattccccatgaggatactcagcactgtgtgccaagacatcacaacctcttttgaagagaggttccatagctcccattagactctcagagaagtctgtcggctgatgaaggcgaggtaggaaagtaggagtgggccaaacccaccccctagacccatatatttgtttttaatttcaattttgtgctatcatgtataaacttggctatttctttttttaaaaaaacaaagtctaaatctctagcttctcttgaaacatttgagaagatcagtggctgtgagcaggcattcctgcccagtggcatttggtgggagctgagtcactgcccaggcatgcccttggcatcatcacctccatcctcacttacgcacccaggggattcactcactgctgttcgcagcctgggctcttgggatgctggagtttgcagccccaatggtccaaaataaaaagcgctgttaactatgaactggtacatcagttagctttgctttagaacttttaatgtggccctaagtggaggcttaatctagttgatctaacacactatttgggtaccaaaagcctgcttagattttttttttttttttaattctggccattcaaatgggatgttttcacagaccagctaataaatgttggctggacccaccaaccaaattagctttttcctttgctttgaatcatattgatactgcctgagttgtgtgactatactatagggaactgctctttaatgccaggcacgcagaatagattttggtggaaagcgaaagtagacttgcaccttttgccacaggcttaaaactcccgctgtctttaataaaggtgcctggacccacctccagcccagatgaaaagatccttggggaggcagagccatgctgggctgtcacacagcaaagactcccctgcgcctccttgcctttggagtgatagcatctcgaattctccagttaaggcttggattgaaatactgagctcctggtttcagtcaaacctagggctcacttgaatcttagggggactgcatttccaactgatctcaagtctttgggggtttaagttggtctgcgtttggcaaaagacaacttcctgtttctaagaaaaaaaggcttatgagggcttacagaaaggactccaggagcttttgggctgcaaaaaggctcttgcaaaacaacatttggatgatttacgtgtaaatgaatcagaaacatgtggattgaatttccttgtgaatacagatgggtttaaaaattaacggaaaaagtgtttggcaaaatactttttgggtttcattttaattgaatctaaaataccaggggtgggggtggggaagccggaggaacgtgggggtcttggggctaagagcccagggtggcctccctgtgtccacttgcaggatttgtggtactggggttcgcttttttttttttttttaaaggcacattcttccagaatagtaaactaagagggccacttcctagacacagtcatcactgacaagaacactaattaatttacgtttagatttgccataaaaagaaagcaatgactctctctgcctgacaagacacttaaccgtgattgggagccaaagacggctgccccttgcttgtaatgtcagcatctctctcactttgacatgtttcaaaggtgccaccctgttttaattttcttagttatccttttattcttcccagcaatcacacaaagtgtgccacatgggatggtgcctatttgacataagagcaaatacacctcagaaaagttaagcaattaacacaaggtcacacagctagtttagtagcagaagtgatgggttaaaaatcccagcagctaacgtctatcaggtcctcactaggagctgaacccaggctaagcactttgcatgtgtcattttattcacctctccaataaccctaagtgttgctgtgattctagctacagaagctgagcttcacagcagaaaagccagaggtgggactcaggcctatctgattctgtgttctctaaataccactatctgcgacctcctagctttgaatgctttcaacaatttttggttacctcaaacaggcttcttttttcccaggatctcactccagcttccccaggctacagttttctaggaaatatggtcagatcattcccgaaacgttgagtgaagccgtgatatggaagacattctgcagtttcatgcaaacctgtcttctcctcccagctatgctttctcccaactttatgttcccagtgaacaaggcctgctgtagctggcatttccttctcccagcttaaggacctaagcaaaggcactcaagatttctgctctgtggcttagtttttgtgctaatacagaggatagggaatgccaagttttttgtagaaactgcttgcagtttggatggaccacttctttatattttgggtgtgaaggggagggaaaaaagagtgacaaagtgaaaattctcactattttgcaaggttcgaagctgcaactttcccagtggtattcaaactatgcaactttccagttatgccttaaaattgaaatcagatttggagagatgtttaggatattttgttctgttaaagacacatacccatgctgatttattataatttttaataaagcacatgtatattttataacgaaaattcattccagagaagatgagagcaaatttgtggctaatagtcgaacaacatagttgtgtgtgggtgtttttttttttttagtcttcattatttttctcagtgagaagtttgaacgcaaagaaaccattgacttctgtcttttctttcatagcgatatctggcatgattgttcctcctatgtgaaagaattgccttgaagaattgtattaatgaagaggttggattctgctacagagagtaatctgatacaagtcccagagtggaacttttaactcaggcctttttaagaggaatcacaataactgcagatttttaaacaaacaaaatcaccgaccttgcaaatactgaaattggaagagggatctgcaagtgcagggtgttggttaaagttgtacctcccaagtatttgggggatatatttattctgtattgacaaaagcaaatccactttttctttttcttttttttttttaagcttaattctgcaatcatttgtcttttataaaccgtaaagctctatacaagggacactataaataagactccatgttttaatttatgatgtttttaaagctgtgtaaaggaagaatgaagtggtgatatttacaaaaaagtaaaaaaaaaaaaaaagaaaaaaaggaaaaaaaaaaaagcttgtatgggacagaataggaatgccagttagattttttagaaaaactaagggtcggcttttgcgccttaaagcatatcaaatggtagttagctcagacagtgcattttcaatatctaacttaacatgccaccccttagcagtgcaagcttatttatctcttttgtattgttgtcttaagcaactgtgtaaataaatgcagcctggaaagttaaaacgcgatgtaagtgatcacatttttccctctactcgaaaatccagtgcctctagacagattgttaaaactgcatatttaaatctgatctcattctctccttttacttaagtcagtttcttctgaagccgatggcctctcgagagcttggtggcacacatactgtgtgagaatctcctttgagacttcatggaacagggtccaggcacagaattccacactctgccctccagttaacaagccaaaacctcacgtacgctcccccatttgcaagtttaaagtttactcgtcctaaatgcagacttcatacctatcttccaaaagttgataaaagcaacgtggcaggtattttcgattttcccattccagatactgcctctatcagtcgacccttaccatttgtaacataatagattgaaacaacaggttaagtgctttggaattaagagttaaagggaaccgggggtggagaaaggaaaagaaggttgagacctccaaaacatagttttctgttctatgggaatttttgctctcattatctgggaagtgttcttaaaaataagaattaatagcaaagatgcagcaaagctctgaggatgcatttgcctgatatttttttctttgctcttgtgtttttgtatgtagttataaatactgtagattttttttttgtgattttttgccaaagttgttgttctatttatacattttaatgtcttaagacattttttcaatatcacaaaaagattttactgcgtattttgcaaagaaaaaaagctcactacctttagcttgcacatacttgcaaagttaattaaaaggctttttgttttaaaggggattttgtaaaatatccatataaataatgtatttatctttcgaatttgtacattgcttttcccttcttcctcttccttccacccccaatttattttattgtgtatgtttgctacgtgaaaagtgcgtatttgtttggtcacctacacttgtattagctgtttcaatgtgatttttaaacatttcatttatagttatttttagtattgttataaaccatgcttcagtttttttaatttccacccaaaagtcattgtctatttttgtattatttgtaagttaagaagttttttccaatatatggcaaaaaaaaaaaaatagtagcatattattcttgtagtatttagttcagtagatttaaaaaaaaatgtatcctttgctttggaagcttacaaaacaaccctaatgctgttttactctattaatatgcatggaatctctccctttggagtgacgcattttgtgcattaaattctagggagaaacttcatagaaatcaatgaacatactttctttcttaagtctgcttgtatatttcctctgtctttcacataaatataaaccagcagattggatgccttaacaatgcaaatcatattcatttcacttgtacattgtaactgtgcaccagaactgtcagtcatcactaacattctaagaaaaaagaaaaagaaaaaaagaaaaaaaaaaaaacaaagaaatcgaaaagcacaaaagaactgttttgttaccttaagacaatgtaactttttctagtagagcaagaaatcatttacaacaatgctgcaactgtgcatgcccccatatggattttgcaatggttttcactaggctgtcaagagtgcgatttttatgggttggggtgggtgggggaggggagttgtgggagggtaggggagggaggaaagctgtttttcatggtgagaaataataatgatgactaataataataaaaaaaactggaaaatgtaagcaaggtggacgcattgcttctcggtactcagaaaggttatctgaatttgcgtggtaagcgctggcctgaagatgtacacaagttaaagccatattttatctggtgagccccttaactgtttctgaaggaatgaacggtcagccgggaaggtgtccggcttagaccttgacaacagacactacccatctgtcagccatgtgcagtggttagaactcttcttgaaagtccaaagagcctttaaaatgtgtataatttgtgttttgttgcttctatttctattgattagatgaaaagacattctggccctctgatcctctttcttctccacaaaagttttacaaataaaagatgttcccctaaatacagaatatggctttaagaagaaaatgaaatgaagaattaaattaagatttcagtgttgggggaaaaaatacagcttctggatgactggattgcataacattgccctggcctcacattgtactaggatgcagcttaaatgaagtcatctctaaatctactaacctttcaccttcttatcaaaactttttgaatagacacacactgtacagttcaattgttagagaacctaactactgtagagattgttaaattttttttttttttttgcaaaaattcaagctgtaaaaacttttcaactttcacaatatttaattaaagttacttcctgtctgtga

SEQ ID NO: 20 - protein, 560 aa, Homo sapiens
MFGIQESIQRSGSSMKEEPLGSGMNAVRTWMQGAGVLDANTAAQSGVGLARAHFEKQPPSNLRKSNFFHFVLALYDRQGQPVEIERTAFVGFVEKEKEANSEKTNNGIHYRLQLLYSNGIRTEQDFYVRLIDSMTKQAIVYEGQDKNPEMCRVLLTHEIMCRFFLKFFLKCNQNCLKNAGNPRDMRRFQVVVSTTVNVDGHVLAVSDNMFVHNNSKHGRRARRLDPSEATPCIKAISPSEGWTTGGATVIIIGDNFFDGLQVIFGTMLVWSELITPHAIRVQTPPRHIPGVVEVTLSYKSKQFCKGTPGRFIYTALNEPTIDYGFQRLQKVIPRHPGDPERLPKEVILKRAADLVEALYGMPHNNQEIILKRAADIAEALYSVPRNHNQLPALANTSVHAGMMGVNSFSGQLAVNVSEASQATNQGFTRNSSSVSPHGYVPSTTPQQTNYNSVTTSMNGYGSAAMSNLGGSPTFLNGSAANSPYAIVPSSPTMASSTSLPSNCSSSSGIFSFSPANMVSAVKQKSAFAPVVRPQTSPPPTCTSTNGNSLQAISGMIVPPM

SEQ ID NO: 21 - protein, 583 aa, Homo sapiens
MFGIQESIQRSGSSMKEEPLGSGMNAVRTWMQGAGVLDANTAAQSGVGLARAHFEKQPPSNLRKSNFFHFVLALYDRQGQPVEIERTAFVGFVEKEKEANSEKTNNGIHYRLQLLYSNGIRTEQDFYVRLIDSMTKQAIVYEGQDKNPEMCRVLLTHEIMCSRCCDKKSCGNRNETPSDPVIIDRFFLKFFLKCNQNCLKNAGNPRDMRRFQVVVSTTVNVDGHVLAVSDNMFVHNNSKHGRRARRLDPSEATPCIKAISPSEGWTTGGATVIIIGDNFFDGLQVIFGTMLVWSELITPHAIRVQTPPRHIPGVVEVTLSYKSKQFCKGTPGRFIYTALNEPTIDYGFQRLQKVIPRHPGDPERLPKEVILKRAADLVEALYGMPHNNQEIILKRAADIAEALYSVPRNHNQLPALANTSVHAGMMGVNSFSGQLAVNVSEASQATNQGFTRNSSSVSPHGYVPSTTPQQTNYNSVTTSMNGYGSAAMSNLGGSPTFLNGSAANSPYAIVPSSPTMASSTSLPSNCSSSSGIFSFSPANMVSAVKQKSAFAPVVRPQTSPPPTCTSTNGNSLQAISGMIVPPM

SEQ ID NO: 22 - protein, 584 aa, Homo sapiens
MFGIQESIQRSGSSMKEEPLGSGMNAVRTWMQGAGVLDANTAAQSGVGLARAHFEKQPPSNLRKSNFFHFVLALYDRQGQPVEIERTAFVGFVEKEKEANSEKTNNGIHYRLQLLYSNGIRTEQDFYVRLIDSMTKQAIVYEGQDKNPEMCRVLLTHEIMCSRCCDKKSCGNRNETPSDPVIIDRFFLKFFLKCNQNCLKNAGNPRDMRRFQVVVSTTVNVDGHVLAVSDNMFVHNNSKHGRRARRLDPSEAATPCIKAISPSEGWTTGGATVIIIGDNFFDGLQVIFGTMLVWSELITPHAIRVQTPPRHIPGVVEVTLSYKSKQFCKGTPGRFIYTALNEPTIDYGFQRLQKVIPRHPGDPERLPKEVILKRAADLVEALYGMPHNNQEIILKRAADIAEALYSVPRNHNQLPALANTSVHAGMMGVNSFSGQLAVNVSEASQATNQGFTRNSSSVSPHGYVPSTTPQQTNYNSVTTSMNGYGSAAMSNLGGSPTFLNGSAANSPYAIVPSSPTMASSTSLPSNCSSSSGIFSFSPANMVSAVKQKSAFAPVVRPQTSPPPTCTSTNGNSLQAISGMIVPPM

SEQ ID NO: 23 - protein, 531 aa, Homo sapiens
MFGIQESIQRSGSSMKEEPLGSGMNAVRTWMQGAGVLDANTAAQSGVGLARAHFEKQPPSNLRKSNFFHFVLALYDRQGQPVEIERTAFVGFVEKEKEANSEKTNNGIHYRLQLLYSNGIRTEQDFYVRLIDSMTKQAIVYEGQDKNPEMCRVLLTHEIMCSRCCDKKSCGNRNETPSDPVIIDRFFLKFFLKCNQNCLKNAGNPRDMRRFQVVVSTTVNVDGHVLAVSDNMFVHNNSKHGRRARRLDPSEGTPSYLEHATPCIKAISPSEGWTTGGATVIIIGDNFFDGLQVIFGTMLVWSELITPHAIRVQTPPRHIPGVVEVTLSYKSKQFCKGTPGRFIYTALNEPTIDYGFQRLQKVIPRHPGDPERLPKEVILKRAADLVEALYGMPHNNQEIILKRAADIAEALYSVPRNHNQLPALANTSVHAGMMGVNSFSGQLAVNVSEASQATNQVVPSSPTMASSTSLPSNCSSSSGIFSFSPANMVSAVKQKSAFAPVVRPQTSPPPTCTSTNGNSLQAISGMIVPPM

SEQ ID NO: 24 - protein, 591 aa, Homo sapiens
MFGIQESIQRSGSSMKEEPLGSGMNAVRTWMQGAGVLDANTAAQSGVGLARAHFEKQPPSNLRKSNFFHFVLALYDRQGQPVEIERTAFVGFVEKEKEANSEKTNNGIHYRLQLLYSNGIRTEQDFYVRLIDSMTKQAIVYEGQDKNPEMCRVLLTHEIMCSRCCDKKSCGNRNETPSDPVIIDRFFLKFFLKCNQNCLKNAGNPRDMRRFQVVVSTTVNVDGHVLAVSDNMFVHNNSKHGRRARRLDPSEGTPSYLEHATPCIKAISPSEGWTTGGATVIIIGDNFFDGLQVIFGTMLVWSELITPHAIRVQTPPRHIPGVVEVTLSYKSKQFCKGTPGRFIYTALNEPTIDYGFQRLQKVIPRHPGDPERLPKEVILKRAADLVEALYGMPHNNQEIILKRAADIAEALYSVPRNHNQLPALANTSVHAGMMGVNSFSGQLAVNVSEASQATNQGFTRNSSSVSPHGYVPSTTPQQTNYNSVTTSMNGYGSAAMSNLGGSPTFLNGSAANSPYAIVPSSPTMASSTSLPSNCSSSSGIFSFSPANMVSAVKQKSAFAPVVRPQTSPPPTCTSTNGNSLQAISGMIVPPM

SEQ ID NO: 25 - protein, 592 aa, Homo sapiens
MFGIQESIQRSGSSMKEEPLGSGMNAVRTWMQGAGVLDANTAAQSGVGLARAHFEKQPPSNLRKSNFFHFVLALYDRQGQPVEIERTAFVGFVEKEKEANSEKTNNGIHYRLQLLYSNGIRTEQDFYVRLIDSMTKQAIVYEGQDKNPEMCRVLLTHEIMCSRCCDKKSCGNRNETPSDPVIIDRFFLKFFLKCNQNCLKNAGNPRDMRRFQVVVSTTVNVDGHVLAVSDNMFVHNNSKHGRRARRLDPSEGTPSYLEHAATPCIKAISPSEGWTTGGATVIIIGDNFFDGLQVIFGTMLVWSELITPHAIRVQTPPRHIPGVVEVTLSYKSKQFCKGTPGRFIYTALNEPTIDYGFQRLQKVIPRHPGDPERLPKEVILKRAADLVEALYGMPHNNQEIILKRAADIAEALYSVPRNHNQLPALANTSVHAGMMGVNSFSGQLAVNVSEASQATNQGFTRNSSSVSPHGYVPSTTPQQTNYNSVTTSMNGYGSAAMSNLGGSPTFLNGSAANSPYAIVPSSPTMASSTSLPSNCSSSSGIFSFSPANMVSAVKQKSAFAPVVRPQTSPPPTCTSTNGNSLQAISGMIVPPM

SEQ ID NO: 26 - protein, 545 aa, Homo sapiens
MFWGKRSGVGLARAHFEKQPPSNLRKSNFFHFVLALYDRQGQPVEIERTAFVGFVEKEKEANSEKTNNGIHYRLQLLYSNGIRTEQDFYVRLIDSMTKQAIVYEGQDKNPEMCRVLLTHEIMCSRCCDKKSCGNRNETPSDPVIIDRFFLKFFLKCNQNCLKNAGNPRDMRRFQVVVSTTVNVDGHVLAVSDNMFVHNNSKHGRRARRLDPSEATPCIKAISPSEGWTTGGATVIIIGDNFFDGLQVIFGTMLVWSELITPHAIRVQTPPRHIPGVVEVTLSYKSKQFCKGTPGRFIYTALNEPTIDYGFQRLQKVIPRHPGDPERLPKEVILKRAADLVEALYGMPHNNQEIILKRAADIAEALYSVPRNHNQLPALANTSVHAGMMGVNSFSGQLAVNVSEASQATNQGFTRNSSSVSPHGYVPSTTPQQTNYNSVTTSMNGYGSAAMSNLGGSPTFLNGSAANSPYAIVPSSPTMASSTSLPSNCSSSSGIFSFSPANMVSAVKQKSAFAPVVRPQTSPPPTCTSTNGNSLQAISGMIVPPM

SEQ ID NO: 27 - protein, 553 aa, Homo sapiens
MFWGKRSGVGLARAHFEKQPPSNLRKSNFFHFVLALYDRQGQPVEIERTAFVGFVEKEKEANSEKTNNGIHYRLQLLYSNGIRTEQDFYVRLIDSMTKQAIVYEGQDKNPEMCRVLLTHEIMCSRCCDKKSCGNRNETPSDPVIIDRFFLKFFLKCNQNCLKNAGNPRDMRRFQVVVSTTVNVDGHVLAVSDNMFVHNNSKHGRRARRLDPSEGTPSYLEHATPCIKAISPSEGWTTGGATVIIIGDNFFDGLQVIFGTMLVWSELITPHAIRVQTPPRHIPGVVEVTLSYKSKQFCKGTPGRFIYTALNEPTIDYGFQRLQKVIPRHPGDPERLPKEVILKRAADLVEALYGMPHNNQEIILKRAADIAEALYSVPRNHNQLPALANTSVHAGMMGVNSFSGQLAVNVSEASQATNQGFTRNSSSVSPHGYVPSTTPQQTNYNSVTTSMNGYGSAAMSNLGGSPTFLNGSAANSPYAIVPSSPTMASSTSLPSNCSSSSGIFSFSPANMVSAVKQKSAFAPVVRPQTSPPPTCTSTNGNSLQAISGMIVPPM

SEQ ID NO: 28 - protein, 554 aa, Homo sapiens
MFWGKRSGVGLARAHFEKQPPSNLRKSNFFHFVLALYDRQGQPVEIERTAFVGFVEKEKEANSEKTNNGIHYRLQLLYSNGIRTEQDFYVRLIDSMTKQAIVYEGQDKNPEMCRVLLTHEIMCSRCCDKKSCGNRNETPSDPVIIDRFFLKFFLKCNQNCLKNAGNPRDMRRFQVVVSTTVNVDGHVLAVSDNMFVHNNSKHGRRARRLDPSEGTPSYLEHAATPCIKAISPSEGWTTGGATVIIIGDNFFDGLQVIFGTMLVWSELITPHAIRVQTPPRHIPGVVEVTLSYKSKQFCKGTPGRFIYTALNEPTIDYGFQRLQKVIPRHPGDPERLPKEVILKRAADLVEALYGMPHNNQEIILKRAADIAEALYSVPRNHNQLPALANTSVHAGMMGVNSFSGQLAVNVSEASQATNQGFTRNSSSVSPHGYVPSTTPQQTNYNSVTTSMNGYGSAAMSNLGGSPTFLNGSAANSPYAIVPSSPTMASSTSLPSNCSSSSGIFSFSPANMVSAVKQKSAFAPVVRPQTSPPPTCTSTNGNSLQAISGMIVPPM

SEQ ID NO: 29 - protein, 450 aa, Homo sapiens
MTKQAIVYEGQDKNPEMCRVLLTHEIMCSRCCDKKSCGNRNETPSDPVIIDRFFLKFFLKCNQNCLKNAGNPRDMRRFQVVVSTTVNVDGHVLAVSDNMFVHNNSKHGRRARRLDPSEATPCIKAISPSEGWTTGGATVIIIGDNFFDGLQVIFGTMLVWSELITPHAIRVQTPPRHIPGVVEVTLSYKSKQFCKGTPGRFIYTALNEPTIDYGFQRLQKVIPRHPGDPERLPKEVILKRAADLVEALYGMPHNNQEIILKRAADIAEALYSVPRNHNQLPALANTSVHAGMMGVNSFSGQLAVNVSEASQATNQGFTRNSSSVSPHGYVPSTTPQQTNYNSVTTSMNGYGSAAMSNLGGSPTFLNGSAANSPYAIVPSSPTMASSTSLPSNCSSSSGIFSFSPANMVSAVKQKSAFAPVVRPQTSPPPTCTSTNGNSLQAISGMIVPPM

SEQ ID NO: 30 - protein, 458 aa, Homo sapiens
MTKQAIVYEGQDKNPEMCRVLLTHEIMCSRCCDKKSCGNRNETPSDPVIIDRFFLKFFLKCNQNCLKNAGNPRDMRRFQVVVSTTVNVDGHVLAVSDNMFVHNNSKHGRRARRLDPSEGTPSYLEHATPCIKAISPSEGWTTGGATVIIIGDNFFDGLQVIFGTMLVWSELITPHAIRVQTPPRHIPGVVEVTLSYKSKQFCKGTPGRFIYTALNEPTIDYGFQRLQKVIPRHPGDPERLPKEVILKRAADLVEALYGMPHNNQEIILKRAADIAEALYSVPRNHNQLPALANTSVHAGMMGVNSFSGQLAVNVSEASQATNQGFTRNSSSVSPHGYVPSTTPQQTNYNSVTTSMNGYGSAAMSNLGGSPTFLNGSAANSPYAIVPSSPTMASSTSLPSNCSSSSGIFSFSPANMVSAVKQKSAFAPVVRPQTSPPPTCTSTNGNSLQAISGMIVPPM

SEQ ID NO: 31 - protein, 459 aa, Homo sapiens
MTKQAIVYEGQDKNPEMCRVLLTHEIMCSRCCDKKSCGNRNETPSDPVIIDRFFLKFFLKCNQNCLKNAGNPRDMRRFQVVVSTTVNVDGHVLAVSDNMFVHNNSKHGRRARRLDPSEGTPSYLEHAATPCIKAISPSEGWTTGGATVIIIGDNFFDGLQVIFGTMLVWSELITPHAIRVQTPPRHIPGVVEVTLSYKSKQFCKGTPGRFIYTALNEPTIDYGFQRLQKVIPRHPGDPERLPKEVILKRAADLVEALYGMPHNNQEIILKRAADIAEALYSVPRNHNQLPALANTSVHAGMMGVNSFSGQLAVNVSEASQATNQGFTRNSSSVSPHGYVPSTTPQQTNYNSVTTSMNGYGSAAMSNLGGSPTFLNGSAANSPYAIVPSSPTMASSTSLPSNCSSSSGIFSFSPANMVSAVKQKSAFAPVVRPQTSPPPTCTSTNGNSLQAISGMIVPPM

SEQ ID NO: 32 - protein, 385 aa, Homo sapiens
MRRFQVVVSTTVNVDGHVLAVSDNMFVHNNSKHGRRARRLDPSEGTPSYLEHAATPCIKAISPSEGWTTGGATVIIIGDNFFDGLQVIFGTMLVWSELITPHAIRVQTPPRHIPGVVEVTLSYKSKQFCKGTPGRFIYTALNEPTIDYGFQRLQKVIPRHPGDPERLPKEVILKRAADLVEALYGMPHNNQEIILKRAADIAEALYSVPRNHNQLPALANTSVHAGMMGVNSFSGQLAVNVSEASQATNQGFTRNSSSVSPHGYVPSTTPQQTNYNSVTTSMNGYGSAAMSNLGGSPTFLNGSAANSPYAIVPSSPTMASSTSLPSNCSSSSGIFSFSPANMVSAVKQKSAFAPVVRPQTSPPPTCTSTNGNSLQAISGMIVPPM

SEQ ID NO: 33 - protein, 595 aa, Homo sapiens
MFGIQESIQRSGSSMKEEPLGSGMNAVRTWMQGAGVLDANTAAQSGVGLARAHFEKQPPSNLRKSNFFHFVLALYDRQGQPVEIERTAFVGFVEKEKEANSEKTNNGIHYRLQLLYSNGIRTEQDFYVRLIDSMTKQAIVYEGQDKNPEMCRVLLTHEIMCSRCCDKKSCGNRNETPSDPVIIDRFFLKFFLKCNQNCLKNAGNPRDMRRFQVVVSTTVNVDGHVLAVSDNMFVHNNSKHGRRARRLDPSEATPCIKAISPSEGWTTGGATVIIIGDNFFDGLQVIFGTMLVWSELITPHAIRVQTPPRHIPGVVEVTLSYKSKQFCKGTPGRFIYTALNEPTIDYGFQRLQKVIPRHPGDPERLPKEVILKRAADLVEALYGMPHNNQEIILKRAADIAEALYSVPRNHNQLPALANTSVHAGMMGVNSFSGQLAVNVSEASQATNQGFTRNSSSVSPHGYVPSTTPQQTNYNSVTTSMNGYGSAAMSNLGGSPTFLNGSAANSPYAIVPSSPTMASSTSLPSNCSSSSGIFSFSPANMVSAVKQKSAFAPVVRPQTSPPPTCTSTNGNSLQDQSFVDSSKFSSAGSLPGLAFS

SEQ ID NO: 34 - protein, 596 aa, Homo sapiens
MFGIQESIQRSGSSMKEEPLGSGMNAVRTWMQGAGVLDANTAAQSGVGLARAHFEKQPPSNLRKSNFFHFVLALYDRQGQPVEIERTAFVGFVEKEKEANSEKTNNGIHYRLQLLYSNGIRTEQDFYVRLIDSMTKQAIVYEGQDKNPEMCRVLLTHEIMCSRCCDKKSCGNRNETPSDPVIIDRFFLKFFLKCNQNCLKNAGNPRDMRRFQVVVSTTVNVDGHVLAVSDNMFVHNNSKHGRRARRLDPSEAATPCIKAISPSEGWTTGGATVIIIGDNFFDGLQVIFGTMLVWSELITPHAIRVQTPPRHIPGVVEVTLSYKSKQFCKGTPGRFIYTALNEPTIDYGFQRLQKVIPRHPGDPERLPKEVILKRAADLVEALYGMPHNNQEIILKRAADIAEALYSVPRNHNQLPALANTSVHAGMMGVNSFSGQLAVNVSEASQATNQGFTRNSSSVSPHGYVPSTTPQQTNYNSVTTSMNGYGSAAMSNLGGSPTFLNGSAANSPYAIVPSSPTMASSTSLPSNCSSSSGIFSFSPANMVSAVKQKSAFAPVVRPQTSPPPTCTSTNGNSLQDQSFVDSSKFSSAGSLPGLAFS

SEQ ID NO: 35 - protein, 603 aa, Homo sapiens
MFGIQESIQRSGSSMKEEPLGSGMNAVRTWMQGAGVLDANTAAQSGVGLARAHFEKQPPSNLRKSNFFHFVLALYDRQGQPVEIERTAFVGFVEKEKEANSEKTNNGIHYRLQLLYSNGIRTEQDFYVRLIDSMTKQAIVYEGQDKNPEMCRVLLTHEIMCSRCCDKKSCGNRNETPSDPVIIDRFFLKFFLKCNQNCLKNAGNPRDMRRFQVVVSTTVNVDGHVLAVSDNMFVHNNSKHGRRARRLDPSEGTPSYLEHATPCIKAISPSEGWTTGGATVIIIGDNFFDGLQVIFGTMLVWSELITPHAIRVQTPPRHIPGVVEVTLSYKSKQFCKGTPGRFIYTALNEPTIDYGFQRLQKVIPRHPGDPERLPKEVILKRAADLVEALYGMPHNNQEIILKRAADIAEALYSVPRNHNQLPALANTSVHAGMMGVNSFSGQLAVNVSEASQATNQGFTRNSSSVSPHGYVPSTTPQQTNYNSVTTSMNGYGSAAMSNLGGSPTFLNGSAANSPYAIVPSSPTMASSTSLPSNCSSSSGIFSFSPANMVSAVKQKSAFAPVVRPQTSPPPTCTSTNGNSLQDQSFVDSSKFSSAGSLPGLAFS

SEQ ID NO: 36 - protein, 544 aa, Homo sapiens
MFGIQESIQRSGSSMKEEPLGSGMNAVRTWMQGAGVLDANTAAQSGVGLARAHFEKQPPSNLRKSNFFHFVLALYDRQGQPVEIERTAFVGFVEKEKEANSEKTNNGIHYRLQLLYSNGIRTEQDFYVRLIDSMTKQAIVYEGQDKNPEMCRVLLTHEIMCSRCCDKKSCGNRNETPSDPVIIDRFFLKFFLKCNQNCLKNAGNPRDMRRFQVVVSTTVNVDGHVLAVSDNMFVHNNSKHGRRARRLDPSEGTPSYLEHAATPCIKAISPSEGWTTGGATVIIIGDNFFDGLQVIFGTMLVWSELITPHAIRVQTPPRHIPGVVEVTLSYKSKQFCKGTPGRFIYTALNEPTIDYGFQRLQKVIPRHPGDPERLPKEVILKRAADLVEALYGMPHNNQEIILKRAADIAEALYSVPRNHNQLPALANTSVHAGMMGVNSFSGQLAVNVSEASQATNQVVPSSPTMASSTSLPSNCSSSSGIFSFSPANMVSAVKQKSAFAPVVRPQTSPPPTCTSTNGNSLQDQSFVDSSKFSSAGSLPGLAFS

SEQ ID NO: 37 - protein, 604 aa, Homo sapiens
MFGIQESIQRSGSSMKEEPLGSGMNAVRTWMQGAGVLDANTAAQSGVGLARAHFEKQPPSNLRKSNFFHFVLALYDRQGQPVEIERTAFVGFVEKEKEANSEKTNNGIHYRLQLLYSNGIRTEQDFYVRLIDSMTKQAIVYEGQDKNPEMCRVLLTHEIMCSRCCDKKSCGNRNETPSDPVIIDRFFLKFFLKCNQNCLKNAGNPRDMRRFQVVVSTTVNVDGHVLAVSDNMFVHNNSKHGRRARRLDPSEGTPSYLEHAATPCIKAISPSEGWTTGGATVIIIGDNFFDGLQVIFGTMLVWSELITPHAIRVQTPPRHIPGVVEVTLSYKSKQFCKGTPGRFIYTALNEPTIDYGFQRLQKVIPRHPGDPERLPKEVILKRAADLVEALYGMPHNNQEIILKRAADIAEALYSVPRNHNQLPALANTSVHAGMMGVNSFSGQLAVNVSEASQATNQGFTRNSSSVSPHGYVPSTTPQQTNYNSVTTSMNGYGSAAMSNLGGSPTFLNGSAANSPYAIVPSSPTMASSTSLPSNCSSSSGIFSFSPANMVSAVKQKSAFAPVVRPQTSPPPTCTSTNGNSLQDQSFVDSSKFSSAGSLPGLAFS

SEQ ID NO: 38 - protein, 557 aa, Homo sapiens
MFWGKRSGVGLARAHFEKQPPSNLRKSNFFHFVLALYDRQGQPVEIERTAFVGFVEKEKEANSEKTNNGIHYRLQLLYSNGIRTEQDFYVRLIDSMTKQAIVYEGQDKNPEMCRVLLTHEIMCSRCCDKKSCGNRNETPSDPVIIDRFFLKFFLKCNQNCLKNAGNPRDMRRFQVVVSTTVNVDGHVLAVSDNMFVHNNSKHGRRARRLDPSEATPCIKAISPSEGWTTGGATVIIIGDNFFDGLQVIFGTMLVWSELITPHAIRVQTPPRHIPGVVEVTLSYKSKQFCKGTPGRFIYTALNEPTIDYGFQRLQKVIPRHPGDPERLPKEVILKRAADLVEALYGMPHNNQEIILKRAADIAEALYSVPRNHNQLPALANTSVHAGMMGVNSFSGQLAVNVSEASQATNQGFTRNSSSVSPHGYVPSTTPQQTNYNSVTTSMNGYGSAAMSNLGGSPTFLNGSAANSPYAIVPSSPTMASSTSLPSNCSSSSGIFSFSPANMVSAVKQKSAFAPVVRPQTSPPPTCTSTNGNSLQDQSFVDSSKFSSAGSLPGLAFS

SEQ ID NO: 39 - protein, 565 aa, Homo sapiens
MFWGKRSGVGLARAHFEKQPPSNLRKSNFFHFVLALYDRQGQPVEIERTAFVGFVEKEKEANSEKTNNGIHYRLQLLYSNGIRTEQDFYVRLIDSMTKQAIVYEGQDKNPEMCRVLLTHEIMCSRCCDKKSCGNRNETPSDPVIIDRFFLKFFLKCNQNCLKNAGNPRDMRRFQVVVSTTVNVDGHVLAVSDNMFVHNNSKHGRRARRLDPSEGTPSYLEHATPCIKAISPSEGWTTGGATVIIIGDNFFDGLQVIFGTMLVWSELITPHAIRVQTPPRHIPGVVEVTLSYKSKQFCKGTPGRFIYTALNEPTIDYGFQRLQKVIPRHPGDPERLPKEVILKRAADLVEALYGMPHNNQEIILKRAADIAEALYSVPRNHNQLPALANTSVHAGMMGVNSFSGQLAVNVSEASQATNQGFTRNSSSVSPHGYVPSTTPQQTNYNSVTTSMNGYGSAAMSNLGGSPTFLNGSAANSPYAIVPSSPTMASSTSLPSNCSSSSGIFSFSPANMVSAVKQKSAFAPVVRPQTSPPPTCTSTNGNSLQDQSFVDSSKFSSAGSLPGLAFS

SEQ ID NO: 40 - protein, 566 aa, Homo sapiens
MFWGKRSGVGLARAHFEKQPPSNLRKSNFFHFVLALYDRQGQPVEIERTAFVGFVEKEKEANSEKTNNGIHYRLQLLYSNGIRTEQDFYVRLIDSMTKQAIVYEGQDKNPEMCRVLLTHEIMCSRCCDKKSCGNRNETPSDPVIIDRFFLKFFLKCNQNCLKNAGNPRDMRRFQVVVSTTVNVDGHVLAVSDNMFVHNNSKHGRRARRLDPSEGTPSYLEHAATPCIKAISPSEGWTTGGATVIIIGDNFFDGLQVIFGTMLVWSELITPHAIRVQTPPRHIPGVVEVTLSYKSKQFCKGTPGRFIYTALNEPTIDYGFQRLQKVIPRHPGDPERLPKEVILKRAADLVEALYGMPHNNQEIILKRAADIAEALYSVPRNHNQLPALANTSVHAGMMGVNSFSGQLAVNVSEASQATNQGFTRNSSSVSPHGYVPSTTPQQTNYNSVTTSMNGYGSAAMSNLGGSPTFLNGSAANSPYAIVPSSPTMASSTSLPSNCSSSSGIFSFSPANMVSAVKQKSAFAPVVRPQTSPPPTCTSTNGNSLQDQSFVDSSKFSSAGSLPGLAFS

SEQ ID NO: 41 - skipped

SEQ ID NO: 42 - protein, 471 aa, Homo sapiens
MTKQAIVYEGQDKNPEMCRVLLTHEIMCSRCCDKKSCGNRNETPSDPVIIDRFFLKFFLKCNQNCLKNAGNPRDMRRFQVVVSTTVNVDGHVLAVSDNMFVHNNSKHGRRARRLDPSEGTPSYLEHAATPCIKAISPSEGWTTGGATVIIIGDNFFDGLQVIFGTMLVWSELITPHAIRVQTPPRHIPGVVEVTLSYKSKQFCKGTPGRFIYTALNEPTIDYGFQRLQKVIPRHPGDPERLPKEVILKRAADLVEALYGMPHNNQEIILKRAADIAEALYSVPRNHNQLPALANTSVHAGMMGVNSFSGQLAVNVSEASQATNQGFTRNSSSVSPHGYVPSTTPQQTNYNSVTTSMNGYGSAAMSNLGGSPTFLNGSAANSPYAIVPSSPTMASSTSLPSNCSSSSGIFSFSPANMVSAVKQKSAFAPVVRPQTSPPPTCTSTNGNSLQDQSFVDSSKFSSAGSLPGLAFS

SEQ ID NO: 43 - protein, 397 aa, Homo sapiens
MRRFQVVVSTTVNVDGHVLAVSDNMFVHNNSKHGRRARRLDPSEGTPSYLEHAATPCIKAISPSEGWTTGGATVIIIGDNFFDGLQVIFGTMLVWSELITPHAIRVQTPPRHIPGVVEVTLSYKSKQFCKGTPGRFIYTALNEPTIDYGFQRLQKVIPRHPGDPERLPKEVILKRAADLVEALYGMPHNNQEIILKRAADIAEALYSVPRNHNQLPALANTSVHAGMMGVNSFSGQLAVNVSEASQATNQGFTRNSSSVSPHGYVPSTTPQQTNYNSVTTSMNGYGSAAMSNLGGSPTFLNGSAANSPYAIVPSSPTMASSTSLPSNCSSSSGIFSFSPANMVSAVKQKSAFAPVVRPQTSPPPTCTSTNGNSLQDQSFVDSSKFSSAGSLPGLAFS

SEQ ID NO: 44 - protein, 397 aa, Homo sapiens; identical to SEQ ID NO: 43

SEQ ID NO: 45 - protein, 360 aa, Homo sapiens
MFGIQESIQRSGSSMKEEPLGSGMNAVRTWMQGAGVLDANTAAQSGVGLARAHFEKQPPSNLRKSNFFHFVLALYDRQGQPVEIERTAFVGFVEKEKEANSEKTNNGIHYRLQLLYSNGIRTEQDFYVRLIDSMTKQAIVYEGQDKNPEMCRVLLTHEIMCSRCCDKKSCGNRNETPSDPVIIDRFFLKFFLKCNQNCLKNAGNPRDMRRFQVVVSTTVNVDGHVLAVSDNMFVHNNSKHGRRARRLDPSEGTPSYLEHATPCIKAISPSEGWTTGGATVIIIGDNFFDGLQVIFGTMLVWSELITPHAIRVQTPPRHIPGVVEVTLSYKSKQFCKGTPGRFIYTGPWNKRLMPGDNKGE

SEQ ID NO: 46 - protein, 361 aa, Homo sapiens
MFGIQESIQRSGSSMKEEPLGSGMNAVRTWMQGAGVLDANTAAQSGVGLARAHFEKQPPSNLRKSNFFHFVLALYDRQGQPVEIERTAFVGFVEKEKEANSEKTNNGIHYRLQLLYSNGIRTEQDFYVRLIDSMTKQAIVYEGQDKNPEMCRVLLTHEIMCSRCCDKKSCGNRNETPSDPVIIDRFFLKFFLKCNQNCLKNAGNPRDMRRFQVVVSTTVNVDGHVLAVSDNMFVHNNSKHGRRARRLDPSEGTPSYLEHAATPCIKAISPSEGWTTGGATVIIIGDNFFDGLQVIFGTMLVWSELITPHAIRVQTPPRHIPGVVEVTLSYKSKQFCKGTPGRFIYTGPWNKRLMPGDNKGE

SEQ ID NO: 47 - protein, 314 aa, Homo sapiens
MFWGKRSGVGLARAHFEKQPPSNLRKSNFFHFVLALYDRQGQPVEIERTAFVGFVEKEKEANSEKTNNGIHYRLQLLYSNGIRTEQDFYVRLIDSMTKQAIVYEGQDKNPEMCRVLLTHEIMCSRCCDKKSCGNRNETPSDPVIIDRFFLKFFLKCNQNCLKNAGNPRDMRRFQVVVSTTVNVDGHVLAVSDNMFVHNNSKHGRRARRLDPSEATPCIKAISPSEGWTTGGATVIIIGDNFFDGLQVIFGTMLVWSELITPHAIRVQTPPRHIPGVVEVTLSYKSKQFCKGTPGRFIYTGPWNKRLMPGDNKGE

SEQ ID NO: 48 - DNA, 43324 bp, Homo sapiens
  source 1..43324: mol_type = genomic DNA
  CDS join(2368..2439,6189..6261,25190..25257,26908..27040,28616..28665,30201..30303,30393..30562,30646..30778,31425..31483,31570..31648,32763..32836,33142..33300,33382..33505,36795..36930,40186..40409,40767..40909): protein_id = 49; translation = MNQPQRMAPVGTDKELSDLLDFSMMFPLPVTNGKGRPASLAGAQFG GSGKSGERGAYASFGRDAGVGGLTQAGFLSGELALNSPGPLSPSGMKGTSQYYPSYSGS SRRRAADGSLDTQPKKVRKVPPGLPSSVYPPSSGEDYGRDATAYPSAKTPSSTYPAPFY VADGSLHPSAELWSPPGQAGFGPMLGGGSSPLPLPPGSGPVGSSGSSSTFGGLHQHERM GYQLHGAEVNGGLPSASSFSSAPGATYGGVSSHTPPVSGADSLLGSRGTTAGSSGDALG KALASIYSPDHSSNNFSSSPSTPVGSPQGLAGTSQWPRAGAPGALSPSYDGGLHGLQSK IEDHLDEAIHVLRSHAVGTAGDMHTLLPGHGALASGFTGPMSLGGRHAGLVGGSHPEDG LAGSTSLMHNHAALPSQPGTLPDLSRPPDSYSGLGRAGATAAASEIKREEKEDEENTSA ADHSEEEKKELKAPRARTSTDEVLSLEEKDLRDRERRMANNARERVRVRDINEAFRELG RMCQMHLKSDKAQTKLLILQQAVQVILGLEQQVRERNLNPKAACLKRREEEKVSGVVGD PQMVLSAPHPGLSEAHNPAGHM
ggaacatgtctcccgccgcaggaagatgaggcagcggcggcggctgcgggcgtagcgggccggagccgacgcggcggcgggcaccgcgggcaccgcgcacgccgctgccccaggggcgccccggccggccgcgcgcacgggccccgcgggacgggccacgcgggggtgggaggggcccgggccacgcgcgccgccgccgccgcccacgcgcgaccctcgggggcccggccgcgacgcacctttgtccgggggggggcccccccgcttcatgccgccgcccccccccacgcgccgcgtgcccggccgcgcccagcaggtgagcccggcggggggcggggggcgcgcccggtacccccgtgctttgtgcccagggaaccccggcccgccccgcgcgcgcttgttgggggggggcgcggaggaagttggggcgggggcggtgtcggggggcgccccgcggcccgggagtcattgttctccaacttcgcgcggcgccgggggggcggcgacgtggaggagcccggagctcgccaggcccgcgtcgcccccgtcgggccgggcacttcgggaaactttaagcagccccgggcgggggcgcggggggcgccggacgggctgtgcaacttaggcgcgaggaccgtcccccccagcccgggcgcacggggaccccggggcgccccctttctcgggtagaggggggcccggcccgggcgccggagtttggggtggggagcgcgcgggagggacgtccttttgtctgcgcggggaaggtgccgcgcgctgcaggcgctggtcggggccgggcgggccgggggggggcgcgcgggtaacatctgctccgcgttaatgcggggcgaggcggcggccgcgctgcgagcttcaaaggctcccgggccgcaccgcctgcaccggctgcggggggaggggggtccggcttcccgggccgcctccccccgggaaaaaggcgttccagcgcgccccccgccttcggcgccgtgcaaagtggcttcaaacattctccaagtctctcaaagtccttgggacgccccagaagtcttccagctcccgtagaatgcccgttttagctcgccacccccccaactaagtctgtcttaaaatcggtttcagctaccccacaaaaaagtgcggtttcgtagtcctcaaaaaaagtcagtttcacacgccctccaaaaaagaaaaaaactgagcgggggaggggctgcgctggggcgcccgcttcacacccggcctccagttggcagacaaagaggggatttctctgcttctgaagttgggtctccctcgacctcggaggctcctccccacccccagcctcggaggtgtctcccgggctgcccccgtccccacctggggacccctggggaaagtcgagactggaggggcctggagtgcatttctttggaatggaaatttttctctgtacctttttctgggggtggaatgggtcttggcaggtggatcccccatcccccatcttagaatggagccccctgggaccacgcgggagcaccctggtcttgagacgctctccccgctcatggagggcaggcaagggatgttgtcaaagttttgcttaaaaataattcccggatacatcgcgacagtaaagcaatctagggctgttttttttttctttcctgaatactgttggggttttcttggggggagggagattgagggtggaggaaagctttgctggtccctgcataggatgcgcgtcccccccacccccggcactttaagtcttgaagcttgtaaaagagtttcgtggttttctgacttgtggatttccttcatgttgaatttgggggcgacctggtcttcaacgggctgtgccatctgctgggggaggggggaatcaccaaatttccctcggggcggggtaggatcgggctgttcctccctttcccgggggtagggggcctcagaggaagcccggggttggttggaaatgagagagttggagaaaggagaggttctggctgccctgcgtgcagtttaaacttggcaacttgatgccctggtgttccctgggggagttagggagtttatatttgcacaccctccccccatttttcagactccctgtggtctctggggaggactctgcagggacctagactctggaattccagcttccctgcgcctgctcccagggctccccgtgcccccagggctctgctggaactcagaccccagggcggttgagggttttttaggtggcttttagcactctgtgctttgaccactcacaactcttctcccctccctgtttctccctgtccatctgtccccacatccaccaagcagggtttccaggcctgaggtgcccgccctggccccaggagaatgaaccagccgcagaggatggcgcctgtgggcacagacaaggagctcagtgacctcctggacttcagcatggtgagccaggacccccgcccagcccccgacacccctttgcctccacagttcacgggaaggttttcaggggagagtgtttgctgaatacttcagcgatggagcctcagctgtttggatgggaggccccggtggggctgggggagtgggccgctctctggcaggaggctgacagcgcacggcagcacgtgtgctatggggcttttgcccggacgcagcattctacagcctactgctttacagatggggaaactgagtcctcaggggcatggtcctgggcccccagcttggctgggtaagcaaaatgcggccttgatcttctgatctgtaaaatgggcctgatcagggtcgcttacctcattgtagatacaaaaattaaaagtaagtaaaagatcactgcactccagtctggttgacagtgagaccctggagaccctgtttcagtaaatgggaggggggctgggcacagtggttcccacctgtcattccagcactttgggaggctgaggcgggaggatcgcttgaggccaggagttccaagtccagcccaggaaacatagtgaggccccatttctcaaaaagacaaaacaaaactcaaaaaattagctaggagtggtggtagatgcctgtggtcccagctacttgggaggctgaggcaaggagaatcacttgagccctggaggttgaggctgcagtgagctgtgattgcgccactgcactccttcctgggcgatagagtaagatccttcctcaaagaagtaaaggagggggtgcccagtgctgagcggaccaccctccgtgaacagggcagacacaacctgccccatacgggactcccctggtgggcagaggatgcgggcatgaaactgactgtgtggttaattagtcacacgtgggtgctgaagttaagctgccagaagccgagcttgggccaggaggaggctggattgggattgagtgggaattcatgggccaccgagcagacagcagcgccaccattgtgactgccacggttatcactgcggagcaggcaggcccggtggggagggcggggcggcttcttcagagtcttaggtggttggatctgtccctgtacggcccattctccacctgggtgaacggaggctcagagggtgctggtcctcagaagtcacacagttcaggcaggtgcagtgaggctggaatgccggagccccctggggtaccggccgctgacgggtgctgtaaaggcccggggcctcggtttgcctgctggtacagtggggccatgtgttatgggttcctggagaagcccagggaccttggtttgtttcttctggcctgtctacagatgtccttaaattctgctccccccccccccccatgcccagtggcagcgtttggggttgaaacaggttgggggagggcactttcagtctgaatttaaccctcccgcctatgaggcacaggccactgaggtctgtcaaaaacaaaagtccccaaactgaaacaacaccggccaccctgcggaaaaaaacagcccaagggccggaggggccaaggctccggaagggccatgctggtatttttaagccccgttttatttttgcttccctggctgagtaacccgaggtgcagttgggttgttttttgttaaactgacaagtcacagaccgctgggctggaacagaccagcgtttggggggagggggcacaggttcagccccaggacctgactcctcacctcaagccactcagcacgtctccccatcccgggtcggagccgttcccagatgaggaaacaggctgggagcggcgaggtgcccgtcctctccgggcgtcccccctcgggctttacccagaggtggagttccacctccctggccaggacggggaggcagaggcagcccctgtgactgcccgcatccccactctgttcctgcatgcctgccttctgcccctgccgaggctgggtcctaggggaagcacttacttccctggaccagatgcgtataaagtgagagaacagggaactccaaataaatacgagggagaacgctaacccaggctgttcccagcgcgcctttgtcctgccctgacccaggctagctttggtcgggaacgaaggacccgccagcactggcctgggctgacatgccctgcctgggtcccaggcagtccctgggcctgagtcaggggcttcaggaatgaagggggagcgagtccctaggaccgaggctgttggaagcgagctccccaggccctgccgcgtgcgagactcccatgggcttttgggtttcaccacgtcccacacagccagagccctcggtccatttctcagaagaggaaactgatgctccaaggggtgcgggggctgttctgggctgctcatgaggcctgcagagcccacaggacacagcccggtacccatgtgacctgtggcacgttggtgcagccctggtgtcctaggggacaaagcagatagaaatgcagttggctgtcccccacagcaggcctttgtttcccaaatgagaggttggcccttggaggtctgggtccaggggaggctgggtgcaccggagcctgcgggagggggtgtggtccagggcgaacactgccttcagcgcgggtgccacccctacccgcaagaccgttcttcctctccagggccaggtgagaatgcggcctccgtttccccttctgcaggaccagggagtgggggacaaccccgcttcctgggtcccctttggacctgtggatcgtggccacaggcgctgtgccttcgcctcctggctggctggggaaggtgttggggatcttggctgctcctcagaaagcccctggctctgattccagccactttgatcacttaagccccgatgggagccttaaaacgcagccccttggggcagggcggaggcttgttgtgtttttttctgtggcaaaagggtttgttgccgttggcttttccggttaatgccgctgagcccgttaatctttagggacttagtgttctgggtacgggtgagccgggcgggagggagggtggcagtcccacacccctagcacccaggagctggatcagctgtggggtgcagcctctccccagcccctccagcttcctgccgggcccggggctccatcccgtgtcttcctcgacctgctgcctgtctgagcctcggcttccccttttgccaagcaaacccatacccagccctggtagggggacactgggccctaccccccgctccagggaccccctgctccagggcctgccatgcggggccagtgcacacacaggaaacgaggagtcagccagggctcaggcatccggggactctccacatgtccacctgttgagtgtaaacctctcacttttcagagctgaaacgtaaagacaactttgtatcactgtcaagagctgataagttgtatccttcgcctaatgggatacccctccccccagagcaaaggcagggggaacagcgagttttcagcggcagggactctgcctggcggtacagcggggtcatcgtctggagttttctcactctgggcgtgggtgtccagggtgcagcgtcacttgagggcacgcgagtcctcagagtcttctggtctgtgatggggcggagcaggacgggccgggcctagatggagcgcagtctcaggttcccgggtgtccccagctctgctcccagcttgggtttgaacccgggactgtagggtttggtttgccacccgccccgctcacgtctcccctcccctccctgcagatgttcccgctgcctgtcaccaacgggaagggccggcccgcctccctggccggggcgcagttcggaggttcaggtaggaccccgccttcctgccagcgctcgtggagtgaggagatcaagggtctgttgaagacagtgtgcgggcgagggaggctggggcagcaaaggagggagacaatggggaaagggccacacaggccgggtcgggggcagcgagcctgaagacccctgaaatcagctgccgttgcccgtgtgacctgccttgggagcccgagcccctgagcccctcgtcccctcgtccctcccgcgcctggagcctgggtctgggggctgggtggggcttgtttttaggcgcagggttggagctgggcctgtgtgtgggtggggatctcgagcatccgtttctccagtcaatccataagggggaaactgaggctctggagagggcgtggtgcgggatcccggctctcactggatcccacccaccttgtgagcctcgacgactttcatttaagcaggtattaggcgcttgctgtatgcagggcccagcaccagggtgaccggccattgtggtttgcccaggactgaggggcaattcctgggacccgcggctttgagtgctcaaagcagaaacatcccaggctgacctggatgagcgggtcaccctcgctgatgacacagcagtgggcgggacagataggggagacgtggggtcctgggggtggcctgaaaatcacactctggagcatgggcagggcttcacggcacacccagcgagggccaggttgccccaaagcgggacctctagtgaaggtctccgcagagggcgtgtcggggcagagccctgagggtgagaggaaggggccgtgggagcatgaggggaggaatttgccaggcagagagagcagcccgtacggacgccctgcggtgggaccggccggcggggcgggctaggggcgctgtgttcgttgcaggggcagcggggagccctggatggttgtgaatggagagagggtctagtctgatgtgcatttgggcggcccaggctggctgtcgacaggatttggtgggggaggttggggcgggtgcccccgatgctgcttcagagccacgggtctctttgtggacatcagcatctttccggggagtgggggcctcgggttggggcctctgaagctgtgtccttcctgcctccgggatctgggtggaaagcgccgtcctgcagttatctccagaatcccccaggggtgggccctggctggagtgtcggggttttgagtggtgggcaaagggggttctgtacttgggcacttgcacccccacatggagagacatcgctttgctgcccccactgcctcacactggccttcccctctacgtgaggaagtggccacagggctggccggaatatgctccctgaggcgtggaaatccccaaacgccaccctgccagccccccggaaacagccccaggaaccggacatgctaatgcttccctgtgtgaggcagagggtcaggccctgggggcttcctggaggaggaagcgcaactcccaaggccgtccacccccattctcctgggcctctgggtgggcttacagcagggcctggtggggagggtggggtgggaggtgtcttccctcgtcccctgtcgcctctcaccccctcagccctggcacggaccactgtgagattggtccctgggtaaccagagctgtggtgtgtaggccgtgtggacctgagaatgctccctctgggttgcctctccctggacgcccagcccggtcccagcaggaacctgccaatgtttgcagatgtattttctgtggttcccacagagtctcgccctgtgctccggccctgccccaatgctgcaggttgggagggtctcgccttgtcccctcacacgttagggcggaggctttggagggcccagtgaggcccagtatgttgcattttttgcccttgagggacgtgatgtggctgctccagcctgggaccccccagctcctggacacagaggggtgaccccctccccgttcagtccatgcagttaacgcccgcctgagcccgggggtggtggaggatgcagagctccaaggcctgagttggtggcaccctcctcattgcctccactcccccaggcccctgcaggctgtggcgctggccccaggtgtggccctcccgaagctcccgcaagatgggcacctgctctcttccatcgtcaggttcagcgagtcgatgggtgcgaggggcggagggatcccggcagggcccaggagctgcagtagctcatttccccgcttcctgcttctcctctccgaggacccaggaagaggggagtttggggctcatcagcaggatggagccccggagctgtgggatcccttcccaaacctcggcttcttcctggaacagtgggtgcagcttccttccaggcggggcctagttggcttcggggacgccacccttcgccaggagtccccaacgctgatggctgatggggtaccccagccgcattctccaccttggccccttcttcatgtgccctgttctagctcccttttaagtcacctcgcttttcttaagttcatttgaaaggaaactttagatttgagaaccagaaacccaggtgagaataaaaggtgtccctgaaaattaattaaacataagttttcccctgtgaagggtctgcctgttcttcgatatttataaatatttaaaaattggtgtcgagagaggagttaggtactgggcaaggtggctcacacctttaatcccagcactttgggaggccaaggcaggaggatcgcttgaggccaggaggtcaaggctgcagtgagctatgtttgagccactgcgctccagcctgggtgactgagagaccccaactcaaacaaacagaaaagggccagacacagtggttcatgcctataatcccagcactttgggggaccaaggcggaaggatcgcttgagcgcaggagttagagaccagcctgggtaacacagcaaaacctcatctctactaaaaatacaaaaattagctgggcgtggtggcgcacacttggggtcccagctactcgggaggctgaggcaggaggattgctggagcctgggaggcggaggttgcagtgagctgagattgcgccactgccctgcagcctgggtgacagagccagaccctgtctcaaaacagaaacgaaacaaaaaaggcattagagattaacgaataggaaaccaagattttctggttgtctggatcggaagacatttaaaacgggaataattttcgtacgccttctcccacccaccgcctcccatttttggaaaccctcaggcacaggtctctgagtgacagcctatcttctgccaagacagacaggctctgaggccacgggagacaccaggaaattgcttattgacggaccaaaggaaagttctttcctatttttcatttccccgtcgctttctctgtccgtgcgattgtaagtgtgacacacggtcagagtgaaaatccacagaacggcacctccgcgttctgctttaagaggaaaccccgggagaacctggcgcatgggtcatttcctccgggtgcgtgtctgggagtggaattgctgggtccctggatgctttttcacattgaaagcgtcccttgtgaccgggcgcggtggctcaggcctgtaatcccagcacttgggaggccaaggcaagaggagtacctgggactaggtgttcgagaccagcctggccaacgtggtgacagcacggcctgtctcatttaataggtgacaaagatcgtgtcctttcacctgccacttgtttaatagagggcggtggtcttctcggaaggggattgaccctgtgaatggctctctggtgaattttctgttactctcttgggccctcgtccttgaagttgatccactttttattctgaagtctttcgggattcacaggaagtggcagagtgttctcctctcacctagccacccccaggggtaccgtcccgcccacccgtggtgctgcgtcagacctaggaagccgacattggtgccgtccacagatcctgatcagattccaccggctttacacgcacgtgtgtgtgtctgtgtgtgcgtgcgggtgtgtgtctgtgcgtgtgcgcgtctgtgcgtgtgcgtgcgtgtgtgcgcacgtgtgtgtgcgtctgcgcgtgcgtgtctgtgcgtctgcgcgtgtgtgcgtgtctgcgtctgtgtctgcgtgcgtgtgtgtacgcgtgcgtgtgtgtgtgtgtgtgtgtgtgtgtgtgtgtgtgtagttctgtgcagttttgagacatgcaccttctttaagcccaggaatcaccaatctgttcttcatctgtacgattttttttttttagggaccaggtctcactctgttgtccagactggagtgcagtggtgtgatcataactgactgtagccttgaagttctgggctcaactgatcctcccacctcagccttgtgagcagctgcgaccacctaattaaaaaaatatgtattttgtagagggctgggtcagcggctcacactggtaatccccagcactttgggaggttgagatgggagaattgccggagcccaggagttcaagaccagcctgggcaacatggagaaaccctgtctctgtttaaaaaaaaagaaaaatttcagctgggtgcggtggctcacacctataatcccagcattttgggaagccagggtgtgtggatcacatgaggccaggagttcaagaccagcctagtcaacgtggcgaaaccccgtctctgctaaaaatacaaaaattagctgggcgtggtggtgcgtgcctgtcatcccagctactcgggaggctgagacacgaaaagcacttgaacctgggaggcggaggttgcagttagctgagattgcgccactgcactctggcctcggggacagagggagaccgtgtctgaagaataaaaaaatattgtctagatggggtcttgctgtgttctccaggctgatcttgtattcatgagctcaagtgatcctcttacctcagcctcccagagtgctgtgattacatgtgtgagccactgtgcccagcccaatttttcactttgagtattttgtgtaaatggaatcctatagtttgcaaccttctgagattagcttttattctgttacgttagcataattccctggagatccagccaagctgttggctgtatcttttttttttctttttattgctgcctcattaactttttttttttttttgagaccgagttttgctcttgttgcccaggctggagtgcagtggcacgatctcagctcactgcaacctccgcctccgcctccgcctcctgagttcaaacgattctcctgcttcagcctcctgagtagctgggaatataggtgcctgccaccatgcctggctaattttttgtagttttagtagagacatggtttcgccacgttggccaggctggtctcaaactcctgacctccagtgatccacccacctcggcctcccaaagtgctgggattacaggcgtgaaccaccgcgcctggccgcctcattaactttttaacaacatcagtaatacaacaatttacatcactttttttttttttttgagacggagtcatgctctgtcacccaggctggggtgcagtggcgtgatctcagctcactgcaagctccgcctcccaggttcacgccattctcctgcctagcctccctagtagctgggactacaggtgccggctaagtttttgtatttttagtagagacggggtttcaccttgttagccaggatggtctccatctcctgaccttgtgatccgcccgcctcggcctcccgaagtgctgggattacaggtgtgagccactgcttacatcagtgtttcttgagcactgtgcattggacacaaagcttggcttattcactgggaattctcagttctaacaggttagcgaaataggtgtaattattaccgtattttactggtaaagaagctgaaacttagagagtttagtaaccattgcgctaattttttgtatttttagtagaggcagggtttcaccgtgttagccaggacagtctcggtctcctgacctggtgatcctcccgcctcggcctcccaaagtgctgggattacaggcatgagccaccgagcccggcctcatttggctgtttgataatgtttgtaggcgcctgtctgtccacccgtgccaaaagtgctgggattccaggcctgaccctctgcgcctggccccgttcggctctttgataacgtttggaggcgcctgtctttccacctgcgcagggaggctgagggcgccgcggtcctcaatgcgccaacttttaggtggtttctttgttcttgactcggctgccctgtgcattttctctctctcgttgatttttcttctggagaatctgcttcattggcaaatcgatattgatcaattgatcaattttcctctttatcggcatttcttctctttctaaagtttttggtgactttcagatcacaggccccttttgctgacttctgccctcttctgttccatcagtgtggtgttgagggttccaccccgtgaaccccatcccattggtttccataatgcatgtttttctcatattactgacatttgttcctttttttttttttttttttttttcctaatttcctcttcaggtcaggttgcttcagaggtttctgagttccaagttggaggtcctttcttgatttctagatctccagtgccaaaactcagctttggcttaaacggtagctactgtttggaggacgcagagctcctctgccgaggctgaaacatggattatttttgtccttctttgtgagtacttgagggatagttggatgtggagctgcgaggcctttgaaccatatttagatttttaatctgtttaatgtcaggctgagagcagcgccatccccctctgttctgtttgtcggtttctctgttgacgtatttagatgccaggattgtgggcttgtgtgggctgagacagtgggatttcgttgtgggtcgagccattgtcaacaacaaaaaaatccgttccttggctggtggtggtggctcatgcctgtaatcccagcactttgggaggccaaggcaggtggatcttctgaggtcaggagttcaagaccagcctggcccacagggcgaaactccatctctactaaaatataaaaaattagccaggcatggtagcaggtgcctgcaatcccagctgctcgggaggctgaggcaggagaatcacttgaacctgggaggcagaggttgcagtgagctgagatcgcgccaccgcactccaccctgggcgacacagcgagactctgtctcagaaaaagaaacctcccttgaattgaaacttcgatatgaaggttgcaacccttcctttttgttggtgtggcttggcagatctttgtgctcctggttgtatctcctgagtcgcttgtttcaaaactgtctttggtcggcaccgtgttttcagattaaagacgttaagcacccgtccatcttcgttctcagcttttccttccatcgtcttattttgtttttccatctgtgtgctcccaactccggattgcttcccccggtgtgtgttttctgaagctctgtaccgctttgcggctctgccagtggttcttttctagttttgaataacacgtttaaggccgtgattgaatagcggttagtattctgcgttgtgaagaacacgtttaaacacgccgtttctcgcgctctcaacgtccgaagtgaaatcgcatctgcccccttctgtgagaaggtgaaaattgagcctgtatatttctcttccctgctggtatttgctaccaataaattgctacttttaaaaaacattgtccgaggccagcggatcatgaggtcaggagatcgagaccatcctggttaacacggtgaaatgccgtatctgttaaaaatacaaaaaaattagccgggcgcggtggtgggcgcctgtagtccagcctgggcgacagagccagactcagtctcaaacaaacaaacaaaaaaaacaaaaaaacattgtatctgttcataattgtgtatttgcatcttactaggaaacatttgtatcattaaatagtgactttgctacttactgtgagggcttgagcaaatggcatctatcttttgcgtcagtttccttatctgtagggtaggggtaatgtagccactgcaaggattcagtgaaatgagagagaactcacaaagtgcccccagagggctttccttgtgtgcctgtcttgttacggcttctaggaatctcttgattcgtaattaaatgtgctcactgtctacttcattccatagaacccccaggctctgccatttctttgaggatccatggggcttacaggcttaagacagtcttctcgttttttagggtaaatcattgaacttcttgaacttcatcctttttgttccatgttgggttccctcttgtgtctctttttctttttcttttttttttgaggtggagtctcgctctattgcccaggctggagtgcagtggcacgatctcggctcactgcaagctctgcctcccgggttcgcgccattctcctgcctcagcctcccgagtagctggtactacaggtgcccaccaccacgcccagctaatttttgtatttttagtagagacgggggtttcaccctgttggccagcatggtcttgatttctggacctcgtgatccgcccgccttggcctcccaaagtgctgggattacaggcgtgagccaccgtgcccggccccgggttggtttctgagcttgttttgaggggcaggttctccggtccccacactcaggtgtcactggtgatgcccatagacatggaagcaagagcgggatggggtctcggttatctctgtggtcactgaaattcaaagcggggccctgtttctctgagttgttacttaacatctgtgctcgatgcccactctcggggccagctctgccctccagggaaaccccagggccttgggggagcggggttgcaaggcgcccctgcttctgggggagaaggttgtccctggttctggtggaggaggttgtcctcggttctggtagaggaggttgccaggcatccccggttctggtggaggaggttgccaggcgtcctcggttctggtggaggaggttgccaggcgtcctcggttctggtggaggaggttgcgaggcgcccctggttctgggggaggagcttgtccctggttctggtggaggaggttgtccccgcttctggtggaggaggttgccagttgtccccggttctggcggaggaggttgtcccccgtgctggtggaggaggttgcgaggcgtccccggttctggcggaggaggttgcctgtgttgcccgcacagcctcactgtgcctctacccgagggcacgtcctgccactttaggtgctgtggggacccccactcttagggtggtgtgtggtctccactcacattctcttcagcctcaggtttgtctgctcgcgggcgggccacagggccctgctgtcccaccccccatcgccagacattagaggcagatcgaagtgggaggctttgcgggatctcgtcagccccccaacaaggaagggctctgtggtgccccagaagcattttctcccccactcgggatcctcctcagaagctgggagcatgtgctacacagcctgcgggccctgaccaagaagacacgacaggaagataaacccagggcggctgcagtgcgcgagctgggccgagggcatcctggtctttcatcttctcccatagcttgaatttagataaaatggaggctgtgcacgcctgtgaccccagggctttgggaaatacaaggtgggaggagcgcctgagtccaggagtttgagaccagcctgggcaatgtagtgagaccccatctctacaaaaaaatttttttaaattcaccaggcgttgtggctcatgcctgtaatcccagcactttgggagtctgaggcagacggatcacttgaggtctgggattcaagaccagcctggccaacatgtatgaaaccccgtctctactaaaaatacaaaaattagctgtgcgtggtggcaggctcctgtagtcccagctacgtgggaggctgaggcgggaaaatcacttgaacccaggaggcggaggttgcagtgagccaagatcgcaccactgcactccagcctgggcaacaagaccctgtctcaaagcaaaagaaaaaaaaaattttttaaaatactgctccacccaaggaaaggccacccccggattcaaacctctgtctgatctcacccgtcatgacccccagaggggctgggaatgggtctgagaagcatcacaagctgcaggggccagacccaggcagggcggtgggacaggctgccatcggggtccttcacgattttaattataaggaggaagaagagacggggcgaggcacgggcttggggggtcatagtgaccctgtatcgggtggcccgctcctactcccgagtaaacggaacctgcgtgaggagctgtcgaggtgttaattggtttttagacgtgaccgtggtatttggtggtggctgttatttcatttgcttttggggactgggttgttcagtacagcaggcattagccatatacacatttttaaatgtaatttttaatgtgcttgaaaaaatgctggccacgtttccagcagttggtagtgtggtccccgtattggacagcagaggtggagaatattttgatcctccaggaaaatgttcttggaagcacagttatttatgagtaaaatgaagacgttgagggtgggtgttttgggggcgtcagctgtgttccaggcagtgctgcagacaaagaggggtcccaggctgggaaggggctcaggcagggggtgtgggtgggggtcacctcctgtgttggggaagaggagagtggtgagatcaggaaagagtttggtctttatcctgaggacggtggggagccatgagagagggtagagggagggagaagagccaagttttgcttctaaaggctccatccggctgcctgaggatgtcagcagacttggaaggaagctgctgcagggactgggcttaacccgctgctgtagctatggggcaagctgctgttctttgggaggagggaaggtgaggaggactcccaggactttagcctgagcacctgagtgggggcacattgcagagctggggctataggatgaagtccccaggcccatctgaagccagaccacctggtggtgtgcctgagggtttggcaggggcggtacacagggctgtgttcagggcccgtgtccaccaatagttttgcctgcccggcatggtaaccccactcctggtactgaagtctgtcgattgggtttcttgtgcagaggcagctgaaggcacttggacagtctttttctgtatcaaggtcagccagccttctccggaaaggaccaaggagtgaatattgttggctgtgcaggacagatggtctctattggaattgattcaactctactgttgcagcaaaagcagccgttgatagtacatggacaaacgggcatagtgtgtgccaataaaactttatttaaaaagcagcttaggggccagacttggtccttgtgtactgtttgcagatccctgctgcagaccaatctcagtcctacccggtatttactaagcgccttttgaagcctccctctcccatttgccaacgagccaccaggcaaagaccagtccccggtccctctcaggaggggacccaacagggaccgggactgggaaaccaccagcctggagcattccttggctacggatggcctctctgaagcagcatctttcattgttatcctcacggcagcccaggcaggtgggcggcttccacaccccgtgactggaattggaactgaagcccaaggggtgggccgctcctggggccctctccccagcgcccctgcgccgtccactcgcaggcctctcccgaggcagccaggctggcccagggcaggaaggtgcccttcccgggtaaaactctgcggtgcttcaccaaagaaatcacagaaaaccacactctgacagcagtgtcttattctattagtacattttaattagaacaggagcaatggatgcattatgaatattcatggtgggttattaaaatgcatcattaatcggtgggggggattttaataactgtattaatgtgggggctgtccttatttttgtcatttctaggaggaggccaaggctgggtgagggagggttcccccaaagggcagattgaggccgcagtgcctctggcacaggcctgttggagtgaacttcgggggcgatccctgggcatggggccccaggaggtcccccaccacaccaggccttccaggggatgagggctggggtgccaggagcctcccgtttgctcagttgggggtctctgcacctcctggggtactggctatggccggaggggaccagacaacatgcaggtggtatagaggcaaactgagacccagagggtgccggcgctgtgcccacccctacacagccagcccaccctggcctcagcagctgccctgttcaccagggcccacgtgcaggaccaggatcttggggtgcagatggcccagacctggcagcgaatgccgtgtggattcctggagaccacaggagccccctgcctggcccccaacccagccaaggcagcatcccagccccccactcataatcacattggaaatttttgattagaaaacaaaatctaaatgaggcgcatgaatattcattagacttggagattaatatgcataattatgcaaatcagacagcaattaaacaccaatactccccggggggaatgattaacacaaaggcaccgaaatagaaggatgcgatttgaaagaagtttctggtgtggatgagcagggagggcagggggcggggcgggggagcctgcagaacagcctgaggtggtgccggtcacagacatcagcactgggctgggtcccccaggcctggctctcgggaagcctctggacttgggagttggacatggacacccccagccctgcaaaagtagggcctgtttgtaaatcatttatagagagggaaaccaaggcagggcagcaactccgtggccaagctgaggaggcccagggcccgctcctgcttctccacgggtgtgctctgtggcccccgatggaagggggaaggatccaagcaggccctccctgcccagggcagaagattctggagtcctgggcgttgcctgtgagtgttctgagagataagggccccgcccgccccgccccgggaccaaggtcctcgtcccgtcccttgctgcgccgggaactcctgccccacgcaggcttctggtctccacactgggcttgttcctgggtgatgagattcggctccaccctcacgggctgccagcctcctgcccgatgggtgagcctctgctgctgcttcagcaaagggcggccccacttcccacactggcaggtggggacagggagaccctgggcctccccagagctcatgggttagcttccacaccctcatgctgtcatgagcctttctcacagggtcagaagagtctgcatctgacacagagaccccagtccacatagtcagggctgggccagagggagggacttggggctgatggggaggaggctcggcgtgagagtgaggtctttgcccaaggagggtatgaaagctggggctttagtgggtgggtaggagttggccagcagagagccgacggaagagttaatttaagtttatggacctgtaagtgctccgagtcccagggtgtctgggtgttagctgctgactggtgtcctcatgagtcgggctgggtgaggctgggttaggaagggttccacaagccccccgggtccactgaggtttgcccctgagatgatgaaccgaagcttttagagctgggcaggcgtgagggtgacccataactctctctgtcctgcctgcaggtcttgaggaccggcccagctcaggctcctggggcagcggcgaccagagcagctcctcctttgaccccagccgggtaggagtccccgtgaggcctgagaccctgagtttcctgtccccagagttgggggcgaggggtgtggggaaactgaggctgagagaaggggccagccttccaggggtttggactgggggacatgggtttgagtcctgcctctccagctgtaatgcggggtggagggggggcctgtgaagccccagcacctctcatccccaccccatctcccctagaccttcagcgagggcacccacttcactgagtcgcacagcagcctctcttcatccacattcctgggaccgggactcggaggtgagtgcctggcctggtgcggtccctctgctgtgcacagatgtgcagacgtgggccttggcatggtcagtgcacgcacagcgccaggcaagtccccagcgttcacccagagggtgtggacagccgaagcctctgcccgtcctgggagcagctgcggggaggtgcaggggacgtggcccggactccctggcacggcactctgcaactaggcttccccgcctgagcgtagaggcagggaggccgttccagaccccacttcctccctgggatttctgcagggctcctcctgcttcccggggaggggtcagccgggctggcctgtgcccgctgggaaggaggcgtaggagttctggagactcgggagggcggccagagtgtgcggtggtcagagcccatgcccttccgcagaccgcccgcccgccctctttccctggggggccctcctgttaaccgagagaatcgtgactcaggttgggctcggtggctcacgcctgtaataccagcactttgggagagcgaggtgggtggatcacctgaggtcaggagtttgagaccagcctggccaacatggtgaaaccccgcttctaccaaaaacacaaaaattagccggtcatggtgttggatgcttatagtgccaactactcaggaggctgaggcaggagaattgcttgaacccaggaggtggaggctgcagtgagccgagatcacgccattgccctccagcctgggtgatggagcgagattccatcttaaaaaaaaaaaaagaatgaagactcaggcctggtgtctggtcccaccccaccacggaacctgggcaagcgccatcctcttctgagcctcagtttccccactgtgggaaagggaccctcccagaaccttcttggagggaggcggtgaggactgacccagctctgcaggccctgcccaatgccaggtgggggttggtgcctggtcttgggtatattccagccccgctgcaggctcacccgtgctgcaggggaacgaaccgacgcttgggaagggcaccctggccgggggtctgcggctgggtggggctgactgggacgccctcctccaggcacctggggctgcgactgggacagtgtcccgtgtgcggtccctcctgcgggtgacacaggaaatgccccgagcttcacatgctccgcctcctgcgggagtgtcaagtcctgtgccccagggttcgggggctcaggtaggggtcttgggggggtcccgctgcttggggggctggtaagggcctcaggggtcccgctgtcgtggtcagcctcctgccccagtgcctcagctgtggaatttgtggtttcatccctcagtcatcctgggatgcgggatccttcccttctctggaacccgacggtttgaggcagtgtttctgctggcttttcgtggtgcagtgggggtgtgcgctgcttagaagccgggagctgtggggcactggacctgctgcggggcccaggtgctcaccgtgtacccctcggcattgttggcttgcggggaaactgaggcccggaggactttggccgacccagccttttccctggaccctgaggggcagcgcctgtttgggccccacagcggggcagggacggtcctgtctcgctttgcccggcctcgaacttggagtacagtagagtcagttggtgtcctgagtaggaagcgaatagcgtgaaggtctggcgggtgtgtctgagggcccaccacgtgccacgggcgatttctgcccgttccccttacggggtaggtgaggcctggccccgcccccctgccgggggtggcccctgcacctgggagcctggttcctcactggctgttccttcctcccagcctcttcctcatacccccgatggccccagggtgggcagggctgacgtgggcagttcccacggcccggccagcaatgcccagagcccagccatgtcccacctgccacccccacgggtggggcccaggccatagccaggcagcttggagagggcaggcgggggtcccggggaggcacggggggcttttgccataacctcagtctcctatggcctcagttttctcacccgaggagccgggcgagtgactgctgtggccgggtgtggcctgtggggtgggtcgtggctgtcatcttccccatgtccccccgggtcaccaagatgaggaaacgggaggcaaaaaacagcagcatttgttccaggagttgggaaatcgttgaacttttaaaattcaaaaatcgggaaatttttttcctgctttgagaataatgtacattactcgatcgcgcgtcccagcccctcacagcagccccagtcacattccgtgcccagtgtcagccagaaggggatttaagtggctcaggtcctgagtaatcggggtgcctgcttcaggcaaggctggatccaggtgtcaccgcatcagccccaggccctccacactgggggctcgccccggcaggctgtcctcctccgtagcccaggccctccatgctgggggctcgccttggccagctgttcccctccgtagcccaggccttccatgctgggggctcgccctggccagctgaccccctccgtagccccgaggcctcacctgtcctttgtcactgagcgccccagggaagtgctcattggtggggtgcaggtcacgtgctcattcgcgaatgaaccctggcctgaaggctgaatgctgggcactttgggggagcctgtgcggtgaacctgatgcggtgtgcacaggccccggggctccccgccagggcccccaggcctgtcccctgggacagacaaatgcctctgaccccagcaccccagggcatcagcccctcaacgcctgaaacagaggaaactgaggctcaggaagggcaggggcctggccagcaggaagcagggccactgtgagctctgctgtccccttcccgcctcaccccgtgagctctgctgtccccttcccgcctcaccccgtgagctctgctgtccccttcccgcctcaccccgtgagctctgctgtccccttcccgcctcacccccgtgagctctgctgtccccttcccgcctcaccccctgtgagctctgctgtccccttcccgcctcaccccgtgagctctgctgtccccttcccgcctcaccccgtgagttctgctgtccccttcccgcctcaccccgtgagctctgctgtccccttcccgcctcaccccgtgagctctgctgtccccttcccgcctcaccccgtgagttctgctgtccccttcccgcctcatcccctgtgagctctgctgtccccttcccgcctcaccccctgtgagctctgctgtccccttcccgcctcatcccctgtgagctctgctgtcccctttccgcctcaccccctgtgagctctgctgtccccttcccgcctcaccccgtgagttctgctgtccccttcccgcctcaccccctgtgagctctgctgtccccttcctgccccacccccgtgagctctgctgtccccttcccgcctcacccccgtgagctctgctgtccccttcccgcctcaccccctgtgagctctgctgtccccttcccgcctcatcccctgtgagctctgctgtcccctttccgcctcaccccctgtgagctctgctgtccccttcccgcctcaccccgtgagttctgctgtccccttcccgcctcaccccctgtgagctctgctgtccccttcccgcctcatcccctgtgagctctgctgtccccttcccgcctcaccccgtgagctctgctgtccccttcccgcctcacccccgtgagctctgctgtccccttcccgcctcaccccctgtgagctctgctgtccccttcccgcctcaccccgtgagctctgctgtccccttcccgcctcaccccgtgagttctgctgtccccttcccgcctcatcccctgtgagctctgctgtccccttcccgcctcacccccgtgagctctgctgtccccttcccgcctcaccccctgtgagctctgctgtccccttcccgcctcaccccctgtgagctctgctgtccccttcccgcctcaccccgtgagctctgctgtccccttcccgcctcatcccctgtgagctctgctgtccccttcccgcctcaccccctgtgagctctgctgtccccttcccgcctcaccccctgtgagctctgctgtccccttcccgcctcaccccctgtgagctctgctgtccccttcccgcctcaccccctgtgagctctgctgtccccttcccacctcaccccgtgagctctgctgtcccctttccgccccaccccctgggcagggcttctgtgggctgcagatgctcagagttggccccgaaatcatcggggaccccttcttgtccccaagcctgtcattgggcaggagatgggcacactgagggcagggctctgcgggagatgggcatactggggccagggctccccgagatgggcacactggggtcaggctctgccagcatcctgccgtggcgctctcagtcgtgtgcacttactgagagcctattgtaggcacatggcaggcactcgggggccctcaggatgttccttggggtcgcctcccactaaccttccttctccccttgcaggcaagagcggtgagcggggcgcctatgcctccttcgggagagacgcaggcgtgggcggcctgactcaggtgaggggctcgggccgggctggggtgtattttgattttaaacaaatctgtcacccaccctctctgatctgcagaagctctcctggcttagctaggttatgtttgcttcctgatagcgaaaccaggctgggcttgggccagggtgggctgggtgggtgtggaccgggagcagaggggaggtaggtgaggaccagggaggccaaggcctgcagggctgccatgcttagctggaggggctcggttgccctctcctctgagtggcaggcaggaaaacaggccatgcagcagggctttgcaggtgtggaccccctggggagcccatacaacaggcccctgtgcagccgagatcctcacccacgctggccctggttgtgaggctgggggaggatgttgggggctgtgaccagccacaggggtcccatgcagcctccggtgctgggcacccccagggttcctccctcaccccaggacttcatctctgtccccgccgtcagctcctagctctcggtggggctcggccttgtcacaggtggggccgtctgtgtgctcactgtgcccaagccagagcaacagtagccatagtgatggagggggccagccgggtgccaggctctgcgccaggggcagatgcgcgtttccctatcagtccccgcaacgaggggccgcggcctacgtgcccattttacagacaggaatacgcaagtgcccgggctccccatccgagaagcagaactagggctcgggccctgctctctggcgctcccgggtgactcatcgagccccgcggtggccacacagggtgcgggctcaggacaggccgggcctcgggagaaggccctgtcctgggcgctgggccaccccgtggggccactggatgatgatagaacagatgattcttttttttttttttgagacggagtttcgctcatggcccaggctggagttcaatggcgcaatcttggctcaccgcaacctctgtctcctgggttcaagcgattctcctgcctcagccttttgagtagctgggattacaggcatgtgccaccatacccggctaattttgtattctttgtagagacggagtttctccatgttggtcaggctggtcttgaactcccgacctcaggtgatccgcccgcctcagcctcccaaagtactgggataataggtgtgagccaccgtgcccggccttagaacggatgaaatgcaggagtcagttccgggacccggctcagggcagccctggctccccaggaagaaagcccgtttcacactaacatgtacagaatccaaccgagggctttacaaaacaaaaccaaaaagataggaagcagccgggtgcacagacgcttagccacgcagctttgtactttgcgtctcagaatcgggggagcagccccttgggttggccacactggtatctgtttctcagtctttcgttcttcgtgaaaacagcagtgtgggatgcggtcagtctcaagtcagaaaaacacagcaggtgtcacagagaaacaccgtgacaggcagaaggggcatcacccactgcagggcgggtctgagtggcttcggcctttgcagttttttcttgaatggaacagcctggggtctggatgccagctgggcgctttctgaccatccgctccccaccaggctggcttcctgtcaggcgagctggccctcaacagccccgggcccctgtccccttcgggcatgaaggggacctcccagtactacccctcctactccggcagctcccggcggagagcggcagacggcagcctaggtgagcggggtctggccggggcatcgggggcttctgggagggagcctgcaaagggaggtaggaggcttcccgttagctgagggcaccagagggagcagaccccgcaccttccaggtcctggctggacgtcgggcgctcgggccgtgggagggatggacggtgacggggggtcgaggcaggggccggcgggcgtggcacgtccagggagaggttcctacgagcctctggtcccgaggttcctgcagctgacgggcacgggctctgccatgtgctttctgtgtcagatgcctcatggggctgcatcgtggctcctctgcactgagccctgctgcacacgcgggcatcccccgcgaggcacgtcacagcctcgggctcaggagcactggacggcgccttgaactacccggggcccattccaggcagcacagtcgccaggcatggcggcactcacctggggtcccagcttctctggaggccgagacaggaggatcacttgaggccaaaagttgcaaaccattctgggcaacatagggagatcccatctttgcgaaaaattttaaaaattagctaagtatggtggcacacacctgtggtcccagctactcaggaggctgaggcaggaggatggtttgaccctgggagttcgaggctgcaatgagctgcgatcgcaccattgtactccagcctgagcaacagcgcaagaccctgcctgaaaaaaataagcgtgaaatcacccacaaaaagcacaaaaacgtaaaagatcgtggctctgaatagaccaaggacaggagccccatgatgcgggaggaggcctctgttccgccttggctgggcacatgcgcctgggccactcgaacttttcccactgtgcgcacgtccgtgagtgatcaggaaggcgcctgagtgctggtttccgggttacggattttatcctgtaggcgagtttgcaaacagcagcccctagtggtgaagcctgactgcgtgggatagtcggggccatcttggaaggagggtggggccaaggggcttctcagcagagccttggcttagaatccaccaactcctcgttttccaaactgcgcgtcgcgggagaaaaccatcgtggttcttcgacatctttggagccgtataaatagacccggggctttttgttgttgttgctgctgctgctgttgtgttttgagacggagtctttctctgtccccaggctggagtgcagtgacacgatctcggctcactgcagcctctgcctcccgggttcaagtgattctcctgcctcggcctcccgagtagctggaattataggcacccgccaccacgcccggctactttttgtattttcagtagagacggggtttcactgtgttggccaggatggtcttgatctcttgacctcgtgatctgcctgccttggcctcccaaagtcctggtattacaggcatgaggcaccgcacccagccgacccgaggtttttaatatatgaaacgggaattgtgagggtctctcctccagggtgtagggcaggggttgttctcatggccggtggccggttctcaccccttttgcttctaacagacacgcagcccaagaaggtccggaaggtcccgccgggtcttccatcctcggtgagtcgcacgagggagaagggaccccacagctcgtcagtggcagtgccaggccctgtgtcctggcgaagcttgggaacacacatggcggggtgggccctgagtggacaggccccctgtgatttctgagccaagatctgagctctgacccgaggccgcctccaagggaaggcggggaagtccttccctaggtccagcctctgtctgtcttgttttgagagaaaggcagtcctggtggctgaggcccctttagaaagggcacaattgtgctgggtgtggtggctcatgcctgtcatcccagcgctttgggaggccgaggtgggtggatcacctgaggtcaggagttctagatcagcctagtcaacatggtgaaaccccatctctactaaaaatacaaaaatcagccgggcgtggtggtgcgtgcctgtaatcccagctacttgggaggctgaggcagaagaatcgtttgaacccaggaggcggaggttgcagtgagccaagatcatgccgctgccctccagcctgagcaacagagtgagactctgtctcaaaaaaaaaaaaaaaaaaagcggggggtgccgcaattggggctccctgttacatcctcacagcttcaggctgccccgcatccctgcctccctaccaggcctcgcagatggtccaggctgctgtgccacactcctgcggtctcatctcgctggagggagagggaatttgccgattccctggctcagtagccaccaaccaccctctgcccagtgcctgtgctggccccaagagccctgggcatacatctcctcacccctccagccgaccagctccccacaggcctgggttcggggttagagtcaggttgacttcccaggccaaaggcgtggtcaggctctgctcccaacagtatcactcactcccctccttccccagggtgcactttctctgccctgaaaccgccccccagtttattacaacatcaggcccacccagcatacttcccgctccagcacagcagcagacgttaccaacaggccccagccccacagtccaggcagtgccaaccagtcagagctggcgctactcacagacccctcttcctgttactttagtgaaggacgaatgttgctctgggaccaagggaagctcagcactggaagattgattccagctggggaacaagggagaaggatgggatggggtgttggagctggggttttgatgggtcgataggagttttctggattaaggaggaaaaaggtttagtaggcagagccagatccaagtcctcaagtacaaaggtcagaagttcagggaggcgggaggtgggggctggaaaaggagtaggagagagagaccaggacatcataagaacctcaaacttggccaggggctgggatttacctaaaggggggtggctttacagggaagggaaacggggtggtagatgtgctaccaggaggggacaggaggccggcaaggtgcatgggctgatcgtggtccctccgtcctgactgcaccccccaccgcccacccgcccgcaggtgtacccacccagctcaggtgaggactacggcagggatgccaccgcctacccgtccgccaagacccccagcagcacctatcccgcccccttctacgtggcaggtacatggcagggcgggggctcgccagggacggtagggcagggctggggttccccactcggcccccaccttaccagctcccctccacagatggcagcctgcacccctcagccgagctctggagtcccccgggccaggcgggcttcgggcccatgctgggtgggggctcatccccgctgcccctcccgcccggtagcggcccggtgggcagcagtggaagcagcagcacgtttggtggcctgcaccagcacgagcgtatggtaggacccagggcagggggcagggggtgggcggagggtggcagtgcccatctaacccaccctcctcctgcctgaccccccagggctaccagctgcatggagcagaggtgaacggtgggctcccatctgcatcctccttctcctcagcccccggagccacgtacggcggcgtctccagccacacgccgcctgtcagcggggccgacagcctcctgggtatggcccctccctgggatgcggcctctccgaggggacactgggctccaggcagggtctgggtggggggtggcgaggactccacgggaggcgcaggcgcgtctgctggccctgagagcgggttgttgtcagttctcattgtccgctgtctgcagggcctgccacgtgcgttgggcttgggatgtctggaaacagatctttgaggagcggctttcccgccttacagctgggaaagaggctcagagagggactcacccacccagggtcagagagggactcacccacccagggtcagagagggactcacccacccaggcccagagagggactcacccacccaggcccagagagggactcagttacccaggcccagagagggactcacccatccaggcccagagggggactcacccacccaggcccagaaggggactcacccacccagggtcccctgccagtggcctgtccccagtgcctcaacccctgcagaggctggtttcagggggtcagacagaaaccggacccgagtcaggctgctctccctggcgcagcagtgtctgtgcaggacggcagaacgcaggagagcttgccgtcggcggcagcacccaggccgggctgcgtgggcctcacctctcttcacccacaggctcccgagggaccacagctggcagctccggggatgccctcggcaaagcactggcctcggtgaggcgtggggcatggggggtggccaggcaagtgacctgagaggccggcccctgaccgcccatctctcctggtcctcctcgcagatctactccccggatcactcaagcaataacttctcgtccagcccttctacccccgtgggctccccccagggcctggcaggtctgtgagggttttggggggaggggaggctgaggtctgtgagggtttggggggaggggaggctgaggtctgtgaaggctttgcgggggaggggaggctggttctggtgtctgcaccttgctgggataggcaggcagcggggagggagcagatggcccccaagggcccgtggcatcgctggtcaggaaccgacggtggaagggagtcccccatgggcttgtgttccactgggcaatccaggaaagctgcctagtggaggcagcctccaagccagccctccaaggctatagcacataaccaggcagtgagggagggctgggaggtggcgtccaggttaggtcacagcacaggcaaagccaggaggcaggacctggcagttcacactgcgtgaacatgaggggacattggcgtgcctagcagctcccaggtccgatggggccagcatcgccagggctgtggcctggactctagaatgtgtgcgtgttgccatttgctcacccactgggtatttattaggtactgactgtttaccctgtgcggtgctccggcatgggagggcagaccctcctatccctgtgaggacgtgcttgcttatccgcagggggtcgggggcaggtacaggaggagggggagtgagaactggaggtttccagaaggtctgggtgtttaaaaacacccgtgagtcctcatctctgcccccatgggaagcgccaggaaccctcacttcacctcggcctgtctggtcccacctggagcttgccactttcttgcctgctgctggagcccagcgtgggtcagccagggtggggcagcatggggaggagccccctactgtgtgctgccgagccactttatcctctgagtggggagttggattttgtagatggggaaactgaggctcagagataggaatggcagtacccactgggcacccagcatccctgcctggcggggccgagcagctttgcatcagtgtggggtgccccggaatggccatcttgggcatcaccggaggctggacaggcggggtggttcatgaatccctccccatgggcatcaggccatgctcacaccccgcccctcgcaccccattcacgtccccactcccttccaggaacgtcacagtggcctcgagcaggagcccccggtgccttatcgcccagctacgacgggggtctccacggcctggtgagtgcctgccccgccccaccccacccttccccgacagaatttgcaggacagacgctccttgagaaggagaaacctttttgttagtttcttgtaaataagccccaagctgttattgaggcctcgtggccgccaaggcacacacattttgtgtgtgctcccgggcgccagatgcctggcatatgcagcttcctggggaaggggaagatgggaccaccggccacttgcatgcggaagggacatgaatggaggcctgtggggtccctcggcttgggcccctcaccacccatccccccaccctgcagcagagtaagatagaagaccacctggacgaggccatccacgtgctccgcagccacgccgtgggcacagccggcgacatgcacacgctgctgcctggccacggggcgctggcctcaggtttcaccggccccatgtcactgggcgggcggcacgcaggcctggtgagcgctgggcgagggtggagctgggcagtgggcggggacccggctccccctgatgcacccgtctccccacgcctgcaggttggaggcagccaccccgaggacggcctcgcaggcagcaccagcctcatgcacaaccacgcggccctccccagccagccaggcaccctccctgacctgtctcggcctcccgactcctacagtggtaagcccttgagcttgggactgtccgactcctggttccagttggggaaactgaggcactctagtggtgggggtcagggtgggagcccagggcaggtgtcaccgtgggggcacctggtgacatgggcgccccagtcagcaacttcaggagggtgggtaagaccggcggggccggcgttggccctgggcgtgtgaggtggacagctctgggctgcctcttcattcgcctgctcccagacgctgtgtgcctggcagcgctcagcactggggaaggggcgaggggtgcagcaggatgcctctgcctcaggggagacagaccaggagctcgctgcacagtacaggtgccagggagaaggaacgaagtggctgcggtgggttgggggttttgtatggctttgaagatggtggcccatgaggccacaaggtggtgtttgggcagcatctgggaggaggcaagagtaggcaagtacctggaggaggagggtttcaggcagagggcgcagcccaggcaaaggccctggggctggactgcacctgggaggaacagccaggagacccgtggggttggagcagagtgaggagagggagagagggaaggggggagggcggggcagggcaggtcatgcggggccttgtgggctgcggggaggacttgggatttggccatgagaaaggtggcagccgtggagggctgaggagggatgggacctgacccaggtgctcacagataccctctggtggctgcttggaggacagactatgagtggcaccgggagaccaaggcagaggccacagggctggtccaggggccttggaggggtgagcagtgggtgggccctgcatctcctgaaggcggggcccacaggatttgtgatggacaggacttgagggtgagagaaggcagggtggctctgggatttctggcccgagctgtgggtgacactggggctgggaactccgtaaggaaggggacaaaggaaaaggttggggacaaatctggacctgggcctggggattgttgagtgtctcagacacccatgagaggcccaggagaaggtggggtcattgtgggcgctgtcctggccctgtgccttccaccagcccaggaatcctgcctgctttccaggcagactttccaagtaccttgattctatcactcctaggccagggcatctcaccgcagcggctctgcccccaggggacactgggtgatgtctggggacatctacagttgtcagggctgaggggagctcctggcatggagtgggtgggggccagggatgctgctcagcaccctgcagtgcccaggacggccccaccccagagaagggtccggacccacaggtcagcagtttccaggggcagccccaagcttagtctttcacccataggctcccctctgtttccttcctgtccttcacttcgtgtgctgaggcctgggctggtcctggtggctggcgttggccgattggagcagagttcactgtggggagcgggtgcatttctgaggctccccctcagggtacgggggtctcaggggatggcagctggtttgctccatgtgagccctgactgattcctggactccccaagcccgggttttgggggtggcccaggccctgctgaatgcagagtggccgcattcatttggggcactgtgtacccttaagccacatgttttgcaattattgttcttgagcttcatgaacacggcgtcccactagcgtgttctttacacgctggtttgctggcttatgttgtgtgtggggtacatgtgtggtgtgagcggctggggtcccattgtgagtgtgccgttggccctggcccgggcgtggggctgtaggtcattccaacatcacgctttcctgccaacctgctgatcaagggtgtgatacacctgttgtcaattcagaggaaaggctgatgaattattttccaaagcagccaagttgccctcccacaggcaagattttgactgttcaggtccctcaactttgctagctgactgggtatgaaagggtagcgcaaagccaccctaatttgcatttccttaatctcttgatgtgctgaagcggacttccacgtgtttctagccatgtggtttccttgtctgtgagatgcctttttggataccttgcttatttttctactgagttactttctttttgtcctttcccattgattgtgggagatcacctcctggttggctacatctgtggtgggtgtcttctattctttggcaaatgcttttcttttcctggtatctttgctgatcaggaactctcaattctgatatagtccagcttactgatttttgttttttcttttttacttgttttgttttgagacagggtctcaccctgtcacaccagagtgcaggggcatgatcacagctcacggtagccatgaccccctggcctcaagtgacccttccacctcagcctcccaaagtgctgggatcacaggcgtgagtcagccactgtgcccggcctgtgttctttcaaaagcagcgctttgagcacttgcttggacagctcttggactaaaatgagaatgataaagattagcatagcatctgcacaagggtgacgtggacattcctgaagtgttccaaagttttattcttttttttttttttgagacggagtcttgctttgtcacccaggctggagtacagtggcgcaatcttggctcactgcaacctccgcctcctgggttcaagtgattctcctgcctcagcctcccaagtagctgggattacaggtacccaccaccacagctggctaattttttgtatttttagtagagatggggtttcaccatgttagccaggatggtcttgatctcctgacctcgtgatccacccacctcggcctcccaaaatgctggcattacaggtgtgagctggtgtgagccactgtgcccatccgaagtgttccatatttttaagttaatgattgaaacagtttactttcaccaaaaaagaagagtgttcttttagcatcttagtagattcctgccattgagttgctgcagaatttctacacactttgttccaaaggtggtaaaactgtttccctttcatcttgtggtccttaatctgtctggcattggtagctacacatggcgtgaggtagggatccagttctggttgttggttttttgtttttatttttggccaagacctggtttttccaggaaagcccaagtccctcaccacaggagcacaaagagatatgtcagttggccctggaggccgacgcaggcccctgaccctaggcctgttgcagggctagggcgagcaggtgccacggcggccgccagcgagatcaagcgggaggagaaggaggacgaggagaacacgtcagcggctgaccactcggaggaggagaagaaggagctgaaggccccccgggcccggaccaggtgccaacccacccctcggcactccccaccctcaccccatcaggacgcacatgtgcacaggccacacgcacaccgcacccacactgggaggccgtcggcgggccccacgctcttcccccaacctcactgtctccctctggccccctcccggcgccctccccatagcccagacgaggacgaggacgaccttctccccccagagcagaaggccgagcgggagaaggagcgccgggtggccaataacgcccgggagcggctgcgggtccgtgacatcaacgaggcctttaaggagctggggcgcatgtgccaactgcacctcaacagcgagaagccccagaccaaactgctcatcctgcaccaggctgtctcggtcatcctgaacttggagcagcaagtgcgaggtcagtgggggcgcgggccaccagcgtccctgcagcgccaccctccctcgtgttcctgccctcgttctccttccccgcccgccttcctggagccagccctccctctgcagcagttgcctccttgcagtgactgtgcccttcacccctctgaccgcattgccatgactgtccactcctgactgccagcccttctccctgcctgcctcagcatcccctccacagtgggaggactggactctttctggacccctagtccttcaggcctgggctctgtggctcagaactgtatctcccagctccacggggctcccactcgccgtggtcctcctttcttgggaagcccagaacccagctcacagaggccagtgtcccccgatcccagagacaggagctggtgtgcaaaccaccctggccccttcccgtcaggcagatgccacgcaaggccacatgagcccatcccctgtctctgactcagtttccctatctgaaggtgatagggaaacttcctatcacccccatttcccagggccagggggaggaaggatacagacagaccctgtccccacccgcagatgtgagctgactccttccccccgctggcgctggcggctgcttccttaactccttcctttcctcgcctgcaccccgttaaccctttctctcctgcagcactgttgctgggaccggagccagagccccggcccggcccacacgctatcccctcagctctaaggtttccgagtctctgcagccgtgtgtggcacgcctcgcgccccccaagcccgcctctctgctgtctgccttccgccctcccctccatcccgcccgtccgtccctctgcttcccgtggcagcccctcctcacctcgcacttgctgcccgagcaccgggagcggctgggctgcaacctcagggcgtttcctcccccaaagccccccgtcagggcttgcgggaagaaaccagacccgggagcacgcagcccctggtcctgtcagtttggtctgtgcgcttgtcctgggctccaggggccgcccccaccacctggagggatcccctcaggcccctaaggcagggtgggcaggcaagtgggtgaggcagccccctagagactaagacagggcaccaggcatgctgggcactgggccagaccttcacccatttcatcttcaccacaacctagagcagtgggtgccctgatggggaccggcatccattctaccaagtaggaagccagggaacagagcgaggtcacccatgcagggccatgcagcacagaggcctgggccgggacccgcacccctgcggcagcagcaacagtgcccgctcgccagctgcatgctgctcggctggagagggggctcagccttgggcctggcacagaacaggctcttggaacctcagagctcctactgcgaccattcacggtggcagtgacaatggggttcctggaggcctagggagctggccttcccagccaggggcaggagctcagggagggctcatcttggggcagccggagttcactgtaggggacgggtgcatttctgaggctcctccccagggtgtgggggtctcgggggatgggagctggtttgctccatgtgagccctgatttgagtcctggactccccagtcccgggtttttggagtggcccaggtatttgcctgctgagcccgtgtcttcaaggcctcctctgtccacagtgagtctggccaggcctagctgtccatcaccccgcaagtggctgctctgagcagggaaagtcatcatcttgggagggaagaacaaagagaggagcaggcactgggcctcccctgcccccagccctgccctggggcccacagagtgagcagggtcaagggagaagcagttaccctgtgggctcccagacggggaagcagggccccatctccctccacagaaacgtctgggaacagtcagaccttgggtcttcctgggtgtgaccacatccacagcctcccctagagctgagtctgagggcacttgcacctgggcagccagtcgcgtacacacacaggcgccccaccatggggctctgctgcattccagggagcacattcgccgcgtgcacagagaagcacattttcacgcatgtgacaacacacacatcagcatgtggacccgtactgctgcccacaccaacaccagccgtgtacccccactgctgtccacacccacaccagccatgtacctgcattgctgtgcccgacaccagccgtgtacctacactgcagtgcctgacaccagctgtgtaactgcactgctgcccacagcagcaccagccatgtacccacattgctgtgcccagcaacgtaagctgtgtacccgcactgctgcccacaccagccgtgtacccccactgctgtccacacccacaccagccatgtacctgcattgctgtgcccgacaccagccgtgtacctgcactgcagtgcctgacaccagctgtgtaactgcactgctgcccacaccaacaccagccgtgtacccacactgctgtgtccaccaacgtaagccgtgtacccgcactgctgcccacacccacaccagccgtgtacccgcactgctgcccacaccaacaccagccgtgtacctgcactgctgcccacaccaacaccagccgtgtacccacactgctgtgcccaccaatgtaagccatgtacctgcactgctgcccacactgctgtgcccaccaacaccagccgtgtacccacactgctgcccacaccagcacaaacacaagtagctggataccctctccacaacccagccctgccctcccacccagccttggcgcatcactaacagaggcctcggtgctgtgacccagcagtacggacgaggtgctgtccctggaggagaaagacctgagggaccgggagaggcgcatggccaataacgcgcgggagcgggtgcgcgtgcgggatattaacgaggccttccgggagctggggcgcatgtgccagatgcacctcaagtcggacaaagcgcagaccaagctgctcatcctgcagcaggccgtgcaggtcatcctggggctggagcagcaggtgcgaggtaggctccccggccagggctgccccagcaccctctcccttccccacacccaggtgcagatgctggggtcctcctgtgcttgccgcccccggactctgtccatgtctgtctttgtggctggactcagacccagtgatgttccccagacaccccctgatacccactctcttctttacaagcctccaccccatccccccagccttctcaaggaaggaggtgagagccggaaatacaggaggccacacgtgatggggctctgcccccacccccccccccgacatcctaccccccactcccacctcacatctttctcctccctgggaccgtctcccacagagctctcccccctccctccagagcggaacctgaatcccaaagcagcctgtttgaaacggcgagaagaggaaaaggtgtcaggtgtggttggagacccccagatggtgctttcagctccccacccaggcctgagcgaagcccacaaccccgccgggcacatgtgaaaggtatgcctccgtgggacgagccacccgctttcagccctgtgctctggccccagaacggccactcgagaccccgggcttcatccacatccacacctcacacacctgttgtcagcatcgagccaacaccaacctgacaaggttcggagtgatgggggcggccaaggtgacactgggtccaggagctccctggggccctggcctaccactcactggcctcgctccccctgtccccgaatctcagccaccgtgtcactctgtgacctgtcccatggatcctgaaactgcatcttggccctgttgcctgggctgacaggagcattttttttttttccagtaaacaaaacctgaaagcaagcaacaaaacatacactttgtcagagaagaaaaaaatgccttaactataaaaagcggagaaatggaaacatatcactcaagggggatgctgtggaaacctggcttattcttctaaagccaccagcaaattgtgcctaagcgaaatattttttttaaggaaaataaaaacattagttacaagattttttttttcttaatgtagatgaaaattagcaaggatgctgcctttggtctctggtttttttaagctttttttgcatatgttttgtaagcaacaaatttttttgtataaaagtcccgtgtctctcgctatttctgctgctgttcctagactgagcattgcatttcttgatcaaccagatgattaaacgttgtattaaaaagaccccgtgtaaacctgagcccccccgtccccccccccccccggaagccactgcacacagacagaacggggacaggcggcgggtcttttgtttttttgatgttgggggttctcttggttttgtcatgtggaaagtgatgcgtgggcgttccctgatgaaggcaccttggggcttccctgccgcatcctctcccctcaggaaggggactgacctgggcttgggggaagggacgtcagcaaggtggctctgaccctcccaggtgactctgccaagcagctgtggcccccagggctaccctacacaacgccctccccaggcccccctaagctgctctcccttggaacctgcacagctctctgaaatggggcattttgttgggaccagtgacccctggcatggggaccacaccctggagcccggtgctggggacctcctggacaccctgtccttcactcctttgccccagggacccaggctcatgctctgaactctggctgagaggatgctgctcaggagccagcacaggacaccccccaccccaccccaccatgtccccattacaccagagggccatcgtgacgtagacaggatgccaggggcctggccagcctcccccaatgctggggagcatccctgggcctggggccacacctgctgccctccctctgtgtggtccaagggcaagagtggctggagccgggggactgtgctggtctgagccccacgaaggccttgggctgtgcgtccgaccctgctgcagaaccagcagggtgtcccctcgggcccatctgtgtcccatgtcccagcacccaggcctctctccaggtctccttttctggtcttttgccatgagggtaaccagctcttcccagctggctggggactgtcttgggtttaaaactgcaagtctcctaccctgggatcccatccagttccacacgaactagggcagtggtcactgtggcacccaggtgtgggcctggctagctgggggccttcatgtgcccttcatgcccctccctgcattgaggccttgtggacccctgggctggctgtgttcatccccgctgcaggtcgggcgtctccccccgtgccactcctgagactcccaccgttacccccaggagatcctggactgcctgactcccctccccagactggcttgggagcctgggccccatggtagatgcaagggaaacctcaaggccagctcaatgcctggtatctgcccccagtccaggccaggcggaggggaggggctgtccggctgcctctcccttctcggtggcttcccctacgccctgggagtttgatctcttaagggaacttgcctctccctcttgttttgctcctggccctgcccctaggtctgggtgggcagtggccccatagcctctggaactgtgcgttctgcatagaattcaaacgagattcacccagcgcgaggaggaagaaacagcagttcctgggaaccacaattatggggggtggggggtgtgatctgagtgcctcaagatggttttcaaaaaaatttttttaaagaaaataattgtatacgtgtcaacacagctggctggatgattgggactttaaaacgaccctctttcaggtggattcagagacctgtcctgtatataacagcactgtagcaataaacgtgacattttataacgat

SEQ ID NO: 49 - protein, 599 aa, Homo sapiens
MNQPQRMAPVGTDKELSDLLDFSMMFPLPVTNGKGRPASLAGAQFGGSGKSGERGAYASFGRDAGVGGLTQAGFLSGELALNSPGPLSPSGMKGTSQYYPSYSGSSRRRAADGSLDTQPKKVRKVPPGLPSSVYPPSSGEDYGRDATAYPSAKTPSSTYPAPFYVADGSLHPSAELWSPPGQAGFGPMLGGGSSPLPLPPGSGPVGSSGSSSTFGGLHQHERMGYQLHGAEVNGGLPSASSFSSAPGATYGGVSSHTPPVSGADSLLGSRGTTAGSSGDALGKALASIYSPDHSSNNFSSSPSTPVGSPQGLAGTSQWPRAGAPGALSPSYDGGLHGLQSKIEDHLDEAIHVLRSHAVGTAGDMHTLLPGHGALASGFTGPMSLGGRHAGLVGGSHPEDGLAGSTSLMHNHAALPSQPGTLPDLSRPPDSYSGLGRAGATAAASEIKREEKEDEENTSAADHSEEEKKELKAPRARTSTDEVLSLEEKDLRDRERRMANNARERVRVRDINEAFRELGRMCQMHLKSDKAQTKLLILQQAVQVILGLEQQVRERNLNPKAACLKRREEEKVSGVVGDPQMVLSAPHPGLSEAHNPAGHM

SEQ ID NO: 50 - DNA, 2843 bp, Homo sapiens
  source 1..2843: mol_type = genomic DNA
agcactctctcacttctggccagggaacgtggaaggcgcaccgacagggatccggccagggagggcgagtgaaagaaggaaatcagaaaggaagggagttaacaaaataataaaaacagcctgagccacggctggagagaccgagacccggcgcaagagagcgcagccttagtaggagaggaacgcgagacgcggcagagcgcgttcagcactgacttttgctgctgcttctgcttttttttttcttagaaacaagaaggcgccagcggcagcctcacacgcgagcgccacgcgaggctcccgaagccaacccgcgaagggaggaggggagggaggaggaggcggcgtgcagggaggagaaaaagcattttcactttttttgctcccactctaagaagtctcccggggattttgtatatattttttaacttccgtcagggctcccgcttcatatttccttttctttccctctctgttcctgcacccaagttctctctgtgtccccctcgcgggccccgcacctcgcgtcccggatcgctctgattccgcgactccttggccgccgctgcgcatggaaagctctgccaagatggagagcggcggcgccggccagcagccccagccgcagccccagcagcccttcctgccgcccgcagcctgtttctttgccacggccgcagccgcggcggccgcagccgccgcagcggcagcgcagagcgcgcagcagcagcagcagcagcagcagcagcagcagcaggcgccgcagctgagaccggcggccgacggccagccctcagggggcggtcacaagtcagcgcccaagcaagtcaagcgacagcgctcgtcttcgcccgaactgatgcgctgcaaacgccggctcaacttcagcggctttggctacagcctgccgcagcagcagccggccgccgtggcgcgccgcaacgagcgcgagcgcaaccgcgtcaagttggtcaacctgggctttgccacccttcgggagcacgtccccaacggcgcggccaacaagaagatgagtaaggtggagacactgcgctcggcggtcgagtacatccgcgcgctgcagcagctgctggacgagcatgacgcggtgagcgccgccttccaggcaggcgtcctgtcgcccaccatctcccccaactactccaacgacttgaactccatggccggctcgccggtctcatcctactcgtcggacgagggctcttacgacccgctcagccccgaggagcaggagcttctcgacttcaccaactggttctgaggggctcggcctggtcaggccctggtgcgaatggactttggaagcaggtaggttgcattttggggtgggcaggggggtattcttgccttcgtcctccctctgagtgtctgtggaagtggggatgtctccaaggagataaggggatttttatttaaagaatttgtgaaagttggtcgatttcaagtcctagtttgttagtttcagcactggcctctgaaaatggccttgcccaggtctccaaggagtgaagggtagtagtgaggtgcagagatactggtgaaccgaatactgggacatgttaaaagagatgtctacctgacagactctttccccagacctccatctccctctaccactagcctacacgttcaaattaacctctcctgttcttttccttatgttatagggtgatcgcacaacctgcatctttagtgctttcttgtcagtggcgttgggagggggagaaaaggaaaagaaaaaaaaaagaagaagaagaagaaaagagaagaagaaaaaaacgaaaacagtcaaccaaccccatcgccaactaagcgaggcatgcctgagagacatggctttcagaaaacgggaagcgctcagaacagtatctttgcactccaatcattcacggagatatgaagagcaactgggacctgagtcaatgcgcaaaatgcagcttgtgtgcaaaagcagtgggctcctggcagaagggagcagcacacgcgttatagtaactcccatcacctctaacacgcacagctgaaagttcttgctcgggtcccttcacctcctcgccctttcttaaagtgcagttcttagccctctagaaacgagttggtgtctttcgtctcagtagcccccaccccaataagctgtagacattggtttacagtgaaactatgctattctcagccctttgaaactctgcttctcctccagggcccgattcccaaaccccatggcttccctcacactgtcttttctaccattttcattatagaatgcttccaatcttttgtgaattttttattataaaaaatctatttgtatctatcctaaccagttcggggatatattaagatatttttgtacataagagagaaagagagagaaaaatttatagaagttttgtacaaatggtttaaaatgtgtatatcttgatactttaacatgtaatgctattacctctgcatattttagatgtgtagttcaccttacaactgcaattttccctatgtggttttgtaaagaactctcctcataggtgagatcaagaggccaccagttgtacttcagcaccaatgtgtcttactttatagaaatgttgttaatgtattaatgatgttattaaatactgttcaagaagaacaaagtttatgcagctactgtccaaactcaaagtggcagccagttggttttgataggttgccttttggagatttctattactgcctttttttttcttactgttttattacaaacttacaaaaatatgtataaccctgttttatacaaactagtttcgtaataaaactttttcctttttttaaaatgaaaataa

SEQ ID NO: 51 - protein, 236 aa, Homo sapiens
MESSAKMESGGAGQQPQPQPQQPFLPPAACFFATAAAAAAAAAAAAAQSAQQQQQQQQQQQQAPQLRPAADGQPSGGGHKSAPKQVKRQRSSSPELMRCKRRLNFSGFGYSLPQQQPAAVARRNERERNRVKLVNLGFATLREHVPNGAANKKMSKVETLRSAVEYIRALQQLLDEHDAVSAAFQAGVLSPTISPNYSNDLNSMAGSPVSSYSSDEGSYDPLSPEEQELLDFTNWF

SEQ ID NO: 52 - DNA, 1065 bp, Homo sapiens
  source 1..1065: mol_type = genomic DNA
atgtcccgcctgctgcatgcagaagagtgggctgaagtgaaggagttgggagaccaccatcgccagccccagccgcatcatctcccgcaaccgccgccgccgccgcagccacctgcaactttgcaggcgagagagcatcccgtctacccgcctgagctgtccctcctggacagcaccgacccacgcgcctggctggctcccactttgcagggcatctgcacggcacgcgccgcccagtatttgctacattccccggagctgggtgcctcagaggccgctgcgccccgggacgaggtggacggccggggggagctggtaaggaggagcagcggcggtgccagcagcagcaagagccccgggccggtgaaagtgcgggaacagctgtgcaagctgaaaggcggggtggtggtagacgagctgggctgcagccgccaacgggccccttccagcaaacaggtgaatggggtgcagaagcagagacggctagcagccaacgccagggagcggcgcaggatgcatgggctgaaccacgccttcgaccagctgcgcaatgttatcccgtcgttcaacaacgacaagaagctgtccaaatatgagaccctgcagatggcccaaatctacatcaacgccttgtccgagctgctacaaacgcccagcggaggggaacagccaccgccgcctccagcctcctgcaaaagcgaccaccaccaccttcgcaccgcggcctcctatgaagggggcgcgggcaacgcgaccgcagctggggctcagcaggcttccggagggagccagcggccgaccccgcccgggagttgccggactcgcttctcagccccagcttctgcgggagggtactcggtgcagctggacgctctgcacttctcgactttcgaggacagcgccctgacagcgatgatggcgcaaaagaatttgtctccttctctccccgggagcatcttgcagccagtgcaggaggaaaacagcaaaacttcgcctcggtcccacagaagcgacggggaattttccccccattcccattacagtgactcggatgaggcaagttag

SEQ ID NO: 53 - protein, 354 aa, Homo sapiens
MSRLLHAEEWAEVKELGDHHRQPQPHHLPQPPPPPQPPATLQAREHPVYPPELSLLDSTDPRAWLAPTLQGICTARAAQYLLHSPELGASEAAAPRDEVDGRGELVRRSSGGASSSKSPGPVKVREQLCKLKGGVVVDELGCSRQRAPSSKQVNGVQKQRRLAANARERRRMHGLNHAFDQLRNVIPSFNNDKKLSKYETLQMAQIYINALSELLQTPSGGEQPPPPPASCKSDHHHLRTAASYEGGAGNATAAGAQQASGGSQRPTPPGSCRTRFSAPASAGGYSVQLDALHFSTFEDSALTAMMAQKNLSPSLPGSILQPVQEENSKTSPRSHRSDGEFSPHSHYSDSDEAS

SEQ ID NO: 54 - DNA, 1534 bp, Homo sapiens
  source 1..1534: mol_type = genomic DNA
ctgcactctccgacagctactgcgctaaaagcgctccttccctgagcttcgggaaagagttcatcttcctgcaaaggagtctcaggctttcccagaggacttgaaaggccttcctcgaaccagccacaccaaactctgctgcagaaggtttccttctctttttcaacttcatgttgagaaaatgactttctcttgagcatctcattttcccctaaatttgggcaagtgaagagatatcagcctggtcatccagtagaacagaaggccgagtcccgcactcccccactgtaaactatttgattgcacgtgagttgctttgtttatgacttatttgctcagaagaggcacgttgggaagcggctcgagagaccagcccacgcgcaggtcctgagcgggcgggcgtgcgaggtcggcgcctcgctgcttggggccggggatgaagtcctgcaagcccagcggcccgccggcgggagcgcgcgttgcacccccgtgcgcgggcggcaccgagtgcgcgggcacgtgcgccggggccgggcggctggagagcgcggcgcgcaggcgcctggcggccaacgcgcgcgagcgccgccgcatgcaggggctcaacactgccttcgaccgcttacgcagggtggttccccagtggggccaggataaaaagctgtccaagtacgagaccctgcagatggccctgagctacatcatggctctgacccggatcctggccgaggccgagcgattcggctcggagcgggactgggtgggtctccactgtgagcacttcggccgcgaccactacctcccgttcccgggcgcgaagctgccgggcgagagcgagctgtacagccagagactcttcggcttccagcccgagcccttccagatggccacctagggcgcgcgcctccgcgggggtgggtgtccggcagccgctccgagcctcggccctgccccaagtagcccagaagcctccggcggcccaggattctaaggatgcaatcctcgaggaaaattagtcgattctcagattacctttattcgcatcatcagacctatggacgcaatcatttaattgcctttcttttcccctcctcctttgtattttgtagatttcattaatggatcttgtgaatgggttgattgctgtgaaaataatgccccctttccccttttctgggctactttgagggaaaacaatcttaagaaaaataggattaagctattctgttccagtcctcagagaaataatcactttcttaaactttgtgagtttgtcctgttcgggtgaagttacagtatccattacttgtgtttgctcacaacagagctaccttcctgttgtgtaaatgcgtttttgctttagtgcattgtgtgtgcaagcatgaagtagaaacactttttttttctgggtacagtacatgggtatcggtgctctgtatttttttaaactgtgtacacattattaaaatatacattttataaaatataaataaaaacgtggatttgtttttcatgccaaaaaaaaaaaaaaaaa

SEQ ID NO: 55 - protein, 152 aa, Homo sapiens
MKSCKPSGPPAGARVAPPCAGGTECAGTCAGAGRLESAARRRLAANARERRRMQGLNTAFDRLRRVVPQWGQDKKLSKYETLQMALSYIMALTRILAEAERFGSERDWVGLHCEHFGRDHYLPFPGAKLPGESELYSQRLFGFQPEPFQMAT

SEQ ID NO: 56 - DNA, 337 bp, Homo sapiens
  source 1..337: mol_type = genomic DNA
aaatagacaagatcaagaccaaagcggaaagaaaaaaaaaatctctaaaccaaagcccagagggagagtagcaaagggttaaaatccttttgattgacgttgtagcctccggtgccctgggctcaggcgcgcgccattggccgccagaccttgtgcctggcggccaatgggggggcgcggtccacgagcggtgccgcgtgtctcctcctcccattggctgaaagttactgtgggaaagaaagtttgggaagtttcacacgagccgttcgcgtgcagtcccagatatatatagaggccgccagggcctagggatcacacaggatccggagctggtgct

SEQ ID NO: 57 - DNA, 2347 bp, Homo sapiens
  source 1..2347: mol_type = genomic DNA
tcagtactcagacccaagttgtgacttcctgtcaggaccaagaggcagcctgctgtggcgcaaaagttggacctgggttcaagttcttctcttccacttgcaggctgtgagatttaaccccagtcttggttgttccctgtaaagtaggatggaagtgttatgaaatgtaatggacacataagcaatgcttggttaccagaacaggtcccattcatggcccacatgacaacctgcttccccagtgggtatttttggagacagctcttctgtttccaggttttctctcctgcctaaatgtcctgcctaagtgccttcaagaacccttcaccatcctgctcctgcatgtgaccaggttccatggtcagttcaatcacctagtcacagttggtaagtgacagagttgggacttgaacctatgcctgcctgacaccaagtctttttttgacacctagagccaagacatctgaagacaaactccctaggagagctggcgtcatagaaaccttaaaggttagggagacctgggtttgaatcaggctttgtcagttatgacttgtgtgaccctagcaagttatttaacctttctgggtctcagtttcctcatctgcaaactgaggataataacagtacctaccaaaaagaactgtcgtgaaaaccatataatttctgcaatgctcctggcacagtgtcctgttctaaagcatagttccccttctctttcttagctccatattgattattaccctaacttgcacaaagagacttggaggacccccatagagtatcggagggtcccccatttcctgctctttccactccacacccccagcaagcacagggaagttctgggggccataatccacccacaggaaccaaatctaagccacctttctggctggtagacatccaggtatgtgggcacagaggtagacaggctgaaatgctgctgtgctatcagttgggttttgctggaacaggaatggaaatggagaggctgacagaactgccctggggagcccaggcaagagggacagtggctggacacccccagccagttgtgcagaccatcagaacaagatcctagattttaggaatacagggttcaagtccgtgcggcaactcttttctaaatatgcccaagccattaactttgagttttaaaaatactgatttacaagctgtacacaatgaaaaaatgcctatccctcacaccatgctgatgctgttccctgccatctcagattaccaattaaatacagaatgcccagttaaatgtgaactttttttttttttttttttttgagatggagttttgttcttgtcgcccaggctagagtgcaatggtgcgatctcagctcactgcaacctctgcctcccaggttcaagcaattctcctgccttagcctcctgagtagctggaactacaggtgcccaccagcacgcctggctaatttttggtatttttagtggagatggggtttcaccatgttggccaggctggtctcgaactcctgacctcaggtgatctgcctgcctcggcctcccaaagtgctgggattacaggcgtgagcctaaatgtgaacttttttaatactaaaaaagtatttgctgttcatctgaaattcacatttaactgggtgtcctgtatttttatttgctaaatctgccatcaaattggtctggctcaacctggagaatggccaggtggtttcagttttacaggcatcttgggacgtggtctccctgctcccctgagtcctcaccccagtcctgggctccctggcccaggcaagccccaggtattgacttacctgccaggtcggcagctcctccttggggctacctggtacctgaatgtcctggagctctagaggttccctccgctggaggcgtggtccggtcagcaggttgggattagtgtgtcataaggaacttctcaccgcccacagtttccgttaaatcgggctcacaggaggccctcagtggggcaaaggaagacccagagagaaaggggagaggggagaggcctgggcctggctggaggcgcatcaaagccctcctttgtgtgctcctgctctggagttcctgctcggccatgtggaagcccggctgtggggctgggatctgggccagtcccattccctcttttctctgccctctttctcctcaagatcccggggtggggttgctgagagagcacccccccccccccaccaccaccaccagggtaataagaggtgaagggaaatcgtaaatatgactacatctacagtggcagctctggcaaatccaggcctattgcccacccctcccccagccagcaggacctggcatggtagttttcacc

SEQ ID NO: 58 - protein, 16 aa, synthetic construct
  MOD_RES 1: note = acetylation; note = acetylation
  SITE 4: note = IsoAsp; note = IsoAsp
  SITE 7: note = Diaminopropionic acid
  SITE 15: note = Hx
RRRDVAXREIRRYQXA

SEQ ID NO: 59 - protein, 16 aa, synthetic construct
  SITE 1: note = Acetylation
  SITE 15: note = Hx
RRRTVALREIRRYQXA

SEQ ID NO: 60 - protein, 16 aa, Synthetic construct
  MOD_RES 1: note = Acetylation
  SITE 4: note = IsoAsp
  SITE 7: note = Diaminopropionic acid
RRRDVAXREIRRYQKA

SEQ ID NO: 61 - DNA, 346 bp, Homo sapiens
  source 1..346: mol_type = genomic DNA
tttcagctttccgattgtgtgcgctttatttttcaattcttcctagtcccggttttgcatttctaatgacagtgaactgacaaagcgtgaaagtggtctaaggagcaaaacaaagccagcaagcctgcttctggtgtgccaagattaatcaatattccagaaacctcggggtttccccctcctccctgtgcggtttccattccccactcctcctttcccgggcacagactcctccccttttcttaagttgccctgatagtaacttgcagtttcagagcacatgcacactgtcagggctagcctgcctgcttacgcgcgctgcggattgttgctccgttgtacctgc

SEQ ID NO: 62 - DNA, 171 bp, Homo sapiens
  source 1..171: mol_type = genomic DNA
tagacaaatttagagaatcgtagtaagcattattttttttctacatacttgtctgcattcagtgtcttcccaagaaacgtcagttaattccccgattcgaaaaaggaactttctcgtaacagttgtacaaccaggctaaagagcacaccctcgtcttccctgaaagggagg

SEQ ID NO: 63 - DNA, 346 bp, Homo sapiens
  source 1..346: mol_type = genomic DNA
cagatctagctctgaagaacccttttatagcctcattggaaggggaaggacggatttttaaaaagaaaatagaatatattccgaatttatgcacatttctcacacgtggtccactaaaatatgcacactgcaaccttgaggtctggtattgtggctctccagtccttgattcctgctgagattatgcaatttgccaagagcttgcctggtgtggagcagcactgatttctcacccctggaggctataactcatgtctctttttctcccattctagttgtgttttctaataccaaagaggaggtttggctttctgtgggtgattcccagacactgaagtgcaaagaa

SEQ ID NO: 64 - DNA, 2623 bp, Mus musculus
  source 1..2623: mol_type = genomic DNA
  CDS 243..1667: protein_id = 65; translation = MSYPQGYLYQAPGSLALYSCPAYGASALAAPRSEELARSASGSAFS PYPGSAAFTAQAATGFGSPLQYSADAAAAAAAGFPSYVGSPYDTHTTGMTGAISYHPYG SAAYPYQLNDPAYRKNATRDATATLKAWLNEHRKNPYPTKGEKIMLAIITKMTLTQVST WFANARRRLKKENKMTWAPRNKSEDEDEDEGDASRSKEESSDKAQDGTETSAEDEGISL HVDSLTDHSCSAESDGEKLPCRAGDALCESGSECKDKFEDLEDEEDEEDECERDLAPPK PVTSSPLTGVEAPLLSPAPEAAPRGGSGGKTPLGSRTSPGAPPPASKPKLWSLAEIATS DLKQPSLGPGCGPPGLPAAAAPASTGAPPGGSPYSASPLLGRHLYYTSPFYGNYTNYGN LNAALQGQGLLRYNTAASSPGETLHAMPKAASDTGKAGSHSLESHYRPPGGGYEPKKDT SEGCAVVGAGVQTYL
actcctgactgcagactcccccaaatcccgaccgccggcctggcgcgcggctgcgcccaccggctccgcgctgccgctaccgccgccccgccgatcctccagccccgcgcccagcctagcgcccaccagcccagcctgctccggcccgcggcctcggtgcgccccggccgggcgtggatggagggcgccgcgcgcgctgcccgctgctccgtgtgacgcgggccccgcgccccgcgcccaccatgtcctacccgcagggctacctgtaccaagcgcccggctcgctggcgctctactcgtgccccgcgtacggcgcgtccgcgctggcggcgccgcgcagcgaggagctggcgcgttcggcgtcgggctccgcgttcagcccgtaccccggctcggcggccttcacagcgcaggcggcaaccggcttcggcagcccgctgcagtactcggcggacgccgccgccgccgcggctgccggcttcccgtcctacgtgggctcgccatacgacacgcacaccaccggaatgactggcgccatcagctaccatccatatggcagtgcggcctatccataccagctcaacgaccccgcgtaccgtaagaacgctacgcgggacgccactgccacactgaaagcctggctcaacgaacaccgaaagaacccgtaccccaccaagggagagaagatcatgctggccattatcaccaagatgaccctcacgcaggtctccacctggttcgccaacgcgcgccgacgtctcaagaaggagaacaaaatgacctgggccccaaggaacaaaagcgaggatgaggacgaggacgagggagatgcttccagaagcaaggaggagagttcagacaaggcacaggatggcacagagacctctgcggaggacgaagggatcagtctacacgtcgactcgctcacggaccactcgtgctcagcggagtcagatggggaaaaattgccctgccgcgccggggatgccttgtgcgaatcaggctcagagtgtaaggacaagtttgaggacctggaggacgaggaggacgaggaagacgagtgcgagcgggacctggcgccacccaagcccgtaacctcctcgcctctcaccggcgtggaggcacccctgctgagcccggcgcccgaagccgcgccgcgcggtggcagcggtggcaagacgcccctaggcagccggacgtcgccaggagcgccgccgcccgccagcaaacccaagctgtggtcgctggccgagatagccacgtcggacctcaagcaaccaagcttgggcccgggttgcgggcctccggggctgcctgctgccgccgcgcctgcctcgactggggcccctccgggaggctcgccctactctgcttcgcccctgctgggccgccacctctattacacgtcccctttctatggcaactacacaaactacgggaacttaaacgcagcgctgcaaggccagggccttctgcggtacaataccgcggcctcctcaccaggcgagacactgcacgccatgcccaaggcggccagcgacacgggcaaggcgggctcgcattcactggagtcccactacaggcctccgggcggcggctacgagcccaagaaagataccagtgagggctgtgcagttgttggtgcaggcgtccagacctacctataggagggccaaggtcagcagtgcaagtaggtgtcacaattgctttggaaaaaaaagtcaggaggctattctcccttcccaagttcataaatacacagatacaaaccccagatgtggaaacccggaccacattttgtgccactgtataagaggatgcacactgcactgccaacccacagactctaaggactggacacacgttgtttgggcatatgagaacttgttgtcatagtatagcttccctatgtttgtgtgacttttggaaacaatctgttttttctcaggatatcctcatcacttcattgccacggtatatattctataggtgtgataggacttgctgtaaaatttatttgtaaaaaaaaatgtacacggtagaactaacgtgattgaagaacttgagtccttcagaagtggaaacaaatttgatatttatttttataatgatataaagcttctagtaatttatgcaagttgtattgcaatgaaatctaaaacttttgtaaataaattctgcctggtttttatttgaacattgctggttatacaatctctgttggttgtttaacatcagttctcctattaatttatatctaaaactgtaaataaaaacagacgcgcctacaagaaaatggtgtttggggctcatttttactggagacccatttgggtagaagctccagcggtagccctggttcctgccccaaaggtggtcctacctcaccttttaagtgaagagccagtgaaataaacgtccttcttgagcttatttgaaaaactgcagacctgagagaaattaatgtacaacagggagatacctacggttccagtttattcacatagaaatgtgtttccagaaagtaattcaggtttttttttgttctctgaatatgcaaatccctacttagtgtaaatttctaaaacatggaagaaaacaaaataaaaggatatgccacctc

SEQ ID NO: 65 - protein, 474 aa, Mus musculus
MSYPQGYLYQAPGSLALYSCPAYGASALAAPRSEELARSASGSAFSPYPGSAAFTAQAATGFGSPLQYSADAAAAAAAGFPSYVGSPYDTHTTGMTGAISYHPYGSAAYPYQLNDPAYRKNATRDATATLKAWLNEHRKNPYPTKGEKIMLAIITKMTLTQVSTWFANARRRLKKENKMTWAPRNKSEDEDEDEGDASRSKEESSDKAQDGTETSAEDEGISLHVDSLTDHSCSAESDGEKLPCRAGDALCESGSECKDKFEDLEDEEDEEDECERDLAPPKPVTSSPLTGVEAPLLSPAPEAAPRGGSGGKTPLGSRTSPGAPPPASKPKLWSLAEIATSDLKQPSLGPGCGPPGLPAAAAPASTGAPPGGSPYSASPLLGRHLYYTSPFYGNYTNYGNLNAALQGQGLLRYNTAASSPGETLHAMPKAASDTGKAGSHSLESHYRPPGGGYEPKKDTSEGCAVVGAGVQTYL

SEQ ID NO: 66 - DNA, 2421 bp, Mus musculus
  source 1..2421: mol_type = genomic DNA
  CDS 389..1843: protein_id = 67; translation = MSYPQGYLYQPSASLALYSCPAYSTSVISGPRTDELGRSSSGSAFS PYAGSTAFTAPSPGYNSHLQYGADPAAAAAAAFSYVGSPYDHTPGMAGSLGYHPYAAPL GSYPYGDPAYRKNATRDATATLKAWLNEHRKNPYPTKGEKIMLAIITKMTLTQVSTWFA NARRRLKKENKMTWTPRNRSEDEEEEENIDLEKNDEDEPQKPEDKGDLEGPESGGAEQK ATAGCERLQGPLSPAGKETEGSLSDSDFKESSSEGRHDELPRPPRAGESSPAGPATARL AEDAGPHYPASVPAPGPHPSAGELPPGSGGSSVIHSPPPPPPPPPAVLAKPKLWSLAEI ATSSDKVKDGGGGSEGSPCPPCPGPMGGQTLGGSRASPAPAPARSPSAQCPFPGGTVLS RPLYYTAPFYPGYTNYGSFGHLHGHPGPGPSPTAGPGSHFNGLNQTVLNRADVLAKDPK MLRSQSQLDLCKDSPYELKKGMSDI
agtccccccaccgactacaccccgggaaggaggagcttcgcgcgcacacaaggcgtcagaatcctcaatttccaacttagcatcttggcaggacctttgcaaagccaaaagcagagccccccggtgcaaagagcgagggaggggggtggggggagagaaagcctagcccgggcaagcggggcgcgcagaggagcgggcgcggcggtcgcagccagaggcgcgcgggaagccaaccaggaggcgccgcgggccggagcccgggagccggggctcgaagagctgcggcccggggcagccagaagccaggtgccctctcgctcgccctcgcagggcgccgcccggctcgttggccgccgcggcgcggcgcgccccatgcccgtgtgtggccatgtcctacccgcagggctacttgtaccagccgtccgcctcgctggcgctctactcgtgccccgcatacagcaccagcgtcatttcggggccccgcacggatgagctcggccgctcttcttcgggctccgcgttctcgccctacgctggctccactgccttcacggctccctcgcccggctacaactcgcacctccagtacggcgccgaccccgcggctgcggccgccgctgccttctcttacgtgggctctccctacgaccacactcccggtatggcaggttccttgggatatcacccttatgcagcacctctgggctcctatccttatggggaccccgcgtaccggaagaatgccactcgggacgctacagccactctcaaggcctggctcaacgagcaccgcaagaacccgtaccccaccaagggagagaagatcatgctggccattatcaccaagatgaccctcacccaggtgtccacctggtttgccaacgcgcgccggcgcctcaagaaagagaacaagatgacgtggacgccacggaaccgcagcgaggacgaggaggaggaggagaacatcgatctggagaagaacgacgaggacgagccacagaagcccgaggacaagggcgacctcgagggccccgaatcaggaggagcagagcagaaggcgactgcgggctgcgaacggctgcaggggccgctcagccccgccggcaaggagaccgaaggcagcctcagcgactcggattttaaggagtcgtcctccgaaggccgccacgatgagctgcccaggcccccgcgcgcgggcgagtcctccccggctgggcccgcaaccgctcgtctggcggaagacgcgggtcctcactaccccgcgagtgtgccggctcccggcccgcacccatcagccggagagctgccccccggctcgggcggatcctcggtcatccactcgccaccgccacctccgccaccgcctccggccgtgctagccaagcccaaactgtggtctctggccgagatcgccacatcctcggacaaggtcaaggacgggggcggagggagcgagggctctccatgcccaccgtgcccagggcccatgggcgggcaaacgcttggaggcagccgcgcgtctcctgccccagcgcccgcacgctcaccctccgcgcagtgtccctttccgggcgggacggtgctgtcccggcctctttattacacggcgcccttctatccgggctacacgaactatggctccttcggacatcttcacggccacccagggccagggccaagccctacagcgggtcctggctctcatttcaatggattaaaccagacggtgttgaatcgtgcggacgttttggctaaagacccgaaaatgttgcggagccagtctcagctagacctgtgcaaagactccccctatgagttgaagaaaggtatgtccgacatttaactctggtgcggtatccccggactttcctaatttattaaaaccatggccttggcagttatttttccatcaccaagagagagaaagaaaaaagaaataaactacccctcttattcagaagtttatagtttatggagatggatggcataaaaatgtatacatctccacactcgaaaaaattgttttagccaactgaaaagaaaaaaaaacttaaaaggatttgtattaaatcttattctgtatatttaatgtagcatttttgtatttaaattgataattcagtatctttgaagtaaattatgaaatcaagacacctgtacaggcatttaatgtttttgtaatataaatatatacatttgtgttcccccaaaactgtttcatagtttaaaaatacaagtttaatttaattttttacacctattgatttttttcctgggtatgagctaaaatattattacagaaaggaagcaggttatacgcttagatttaaaaaaaaaagtaagagaaactgcagtggtctttgtaaaatgcaaaatatttaattaaaggagattttaacataaaaaaaaaaaaaaaaaaaa

SEQ ID NO: 67 - protein, 484 aa, Mus musculus
MSYPQGYLYQPSASLALYSCPAYSTSVISGPRTDELGRSSSGSAFSPYAGSTAFTAPSPGYNSHLQYGADPAAAAAAAFSYVGSPYDHTPGMAGSLGYHPYAAPLGSYPYGDPAYRKNATRDATATLKAWLNEHRKNPYPTKGEKIMLAIITKMTLTQVSTWFANARRRLKKENKMTWTPRNRSEDEEEEENIDLEKNDEDEPQKPEDKGDLEGPESGGAEQKATAGCERLQGPLSPAGKETEGSLSDSDFKESSSEGRHDELPRPPRAGESSPAGPATARLAEDAGPHYPASVPAPGPHPSAGELPPGSGGSSVIHSPPPPPPPPPAVLAKPKLWSLAEIATSSDKVKDGGGGSEGSPCPPCPGPMGGQTLGGSRASPAPAPARSPSAQCPFPGGTVLSRPLYYTAPFYPGYTNYGSFGHLHGHPGPGPSPTAGPGSHFNGLNQTVLNRADVLAKDPKMLRSQSQLDLCKDSPYELKKGMSDI

SEQ ID NO: 68 - DNA, 5206 bp, Mus musculus
  source 1..5206: mol_type = genomic DNA
  CDS 80..1858: protein_id = 69; translation = MFGIQESIQRSGSSMKEEPLGSGMNAVRTWMQGAGVLDANTAAQSG VGLARAHFEKQPPSNLRKSNFFHFVLALYDRQGQPVEIERTAFVGFVEKEKEANSEKTN NGIHYRLQLLYSNGIRTEQDFYVRLIDSMTKQAIVYEGQDKNPEMCRVLLTHEIMCSRC CDKKSCGNRNETPSDPVIIDRFFLKFFLKCNQNCLKNAGNPRDMRRFQVVVSTTVNVDG HVLAVSDNMFVHNNSKHGRRARRLDPSEGTPSYLEHAATPCIKAISPSEGWTTGGATVI IIGDNFFDGLQVIFGTMLVWSELITPHAIRVQTPPRHIPGVVEVTLSYKSKQFCKGTPG RFIYTALNEPTIDYGFQRLQKVIPRHPGDPERLPKEVILKRAADLVEALYGMPHNNQEI ILKRAADIAEALYSVPRNHNQLPALANTSVHAGMMGVNSFSGQLAVNVSEASQATNQGF TRNSSSVSPHGYVPSTTPQQTNYNSVTTSMNGYGSAAMSNLGGSPTFLNGSAANSPYAI VPSSPTMASSTSLPSNCSSSSGIFSFSPANMVSAVKQKSAFAPVVRPQTSPPPTCTSTN GNSLQAISGMIVPPM
ttttttttttttttcctttttttttttttcaaatattttcaaaggggaggagatttttccacaagaaaaggttgttttcatgtttgggatccaggaaagcatccaacggagtggaagcagtatgaaggaagagccgctgggcagcggcatgaacgcggtgcggacgtggatgcagggcgccggggtgctggacgccaacacagcggcgcagagcggggtgggtctggcccgggctcactttgagaagcagccgccttctaacctgcggaaatccaacttcttccacttcgtcctggccctctacgacagacagggccagcccgtggagattgagaggacggcctttgtggggttcgtggagaaggaaaaagaagccaacagcgaaaagaccaataatgggatccactaccggctccagctcctctacagcaatgggatacggacagaacaggatttctatgtgcgcctcatcgactccatgacaaaacaagccatagtgtatgaaggccaagacaagaaccctgaaatgtgccgagtattgctcacacacgagatcatgtgcagccgctgttgtgacaagaaaagctgtggcaaccgaaatgagactccctcagatccagtgataattgacaggttcttcctgaagtttttccttaaatgcaaccaaaattgcctaaagaatgcaggaaacccacgtgacatgcggagattccaggtcgtggtgtctaccacagtcaacgtggatggccatgtcctggcagtctctgataacatgtttgtccacaataactccaagcacgggcggagggctcggaggcttgacccctcggaaggtacgccctcttatctggaacatgcagctactccctgtatcaaagccatcagcccgagtgaaggatggacgacgggaggcgcgactgtgatcatcataggggacaatttctttgatgggttacaggtcatattcggtaccatgctggtctggagtgagttgataactcctcatgccatccgagttcagacacctcctcggcacatccctggtgtggtggaagtcacactgtcgtacaagtccaagcagttctgcaaagggacaccaggcagattcatctacacagcactcaatgaacccaccatcgactacggcttccagaggttacagaaggtcattcctcggcatcctggtgacccagagcgcttgccaaaggaagtgatccttaaaagagctgcagatctggttgaagccctgtatgggatgccccacaacaaccaggagattatcctgaagagagctgccgacattgcagaggctctgtacagtgtccctcggaaccacaaccagctcccagcccttgctaacacttcggtccatgcagggatgatgggtgtgaactccttcagtggacaactggctgtgaatgtctcggaggcatcacaagccaccaatcaaggtttcacccgcaactcaagcagcgtgtcaccacatggctatgtgccgagcaccaccccacagcaaaccaactataactcagtcaccacaagcatgaatggctacggctcagccgccatgtccaatttgggcggctccccaaccttcctcaatggctcagctgccaactcaccctatgccattgtgccatccagccccaccatggcctcatctacaagcctcccctccaactgcagtagctcctctggcatcttctccttctcaccagccaacatggtctcagcagtgaaacagaagagtgctttcgcaccagttgtcagaccccagacgtcccctcctcccacctgcaccagcaccaacgggaacagcctgcaagcgatatctggcatgattgtccctcccatgtgaaagaattgccttgaagaattttattaatgaagaggttggattctgctacgaaagttatctgacatgagtcccagagtggaacttttaactcaggcctttttaagaggaatcacacaataactgcagatttttaaacaaaatcaccgaccttgcaaatactgaaattggaaagggggtctgccagagcagggtgttggttaaagttgtaacccccgagtatctgggggatatatttattctgtattgataaaaagcaagcccacattttctttttctttctttcttttcttaagcttaactctgcaaccatttgtcttttataaaccattaagctacacacaagggccactataaacaagactccatgttttaatttatgtttttaaagctatggaaggggagaatgaagtggtgatatttacaaaaaaaaaaaatctaaaaggagaaaaaaaaaagaaaaacagggaaaaataaatttaaaaaaagagctcgtatggacagaataggaatgccagttagattttttagtgaactaagggtcggcttctgcgccttaaagcttatcagtggtagttagctcagacagtgcattttcaatatctaacttaacacgccaccccttagcagtgcaagcttcgttctctcttttgtatggttgtcttaagtaactgtgtaaataagtgtagcctggaaagttaccaagcgacatacatgatcacgtttgcccttgtactcgaaaagccagtgcctctagacagattgtttaaaaacaaacaaaaacaaaacaaaacaaaacaaaacaacatgcatctttaaacccgatcttattcttttacttaacatcaacttctcccgaagccagcggcctctgagagtggagcaacacatgttccgagcgagaatctccttcaagacttcacaggacagggtccaggcacagaattccatatatgccctccagtttaccaagccaaaatctcgctcgcactccaccgtcaagagatccaagcttactcaagctggaatcctagatattaactctagatctgggctcaaaaacccaaataaagcaaacccacaaaggcaagtaggtgtgctgttccgggctcccaaatcacacgggtctatacccgcaagactccgcaaggtcccaaatcacacaggggtctgtatccgcaagactccgcaaggttggaaagttctatattcagtcaacaggtaaagtgctttggagttcagtgtgaaaggaaactgggagagaggaagggaaggttgaggcttcaaactcagctttctatgggaaattttgctttcaactgggaagtgttcttaaagaatccatagcaaagattcagccagcaaggctctgagggggcgtgttcctgctgacctctgcccttctgtttctgtatgtagttataaatactgtagatttcttttgtgattttttttttgccaaagttgttttatttatacattttaatgtcttaagattttcgatctcacacacgcaaagaattatactgcatattttgcaaagaaataaaaagcgcactacctttagcttgcacatacttgcaaagttaattcaaaggctttctgtttgtttgttttaatggggattttgtaaaatatccatataaataatgtatttatctttggaatttgtacattgcttttctctccttcctcccatcccccacccctagtttattttgtgtgtgtgtttgctttgtgaacagtgcgcaagtatagtttggtcacttatagttgtattagctgtttcaatgtgatttttaaacaattcatttataggtatttttagtattgttttaaaccatgcttcatttttttatttccacccaaaagccattgtctatttttgtattatttgtaagttaagaagttttttccaatatatggcaaaaaaatagtagcatattattcttgtagtatttagttctgtagatttaaaaataatgtaccctttgctttggaagcatacaaaaacgctgttttactctagtaatatgcatggaatctctccctttggagtgacgcattttgtgcattaaatttgggggagaaacttcatagagatcaatgaacatactttctttcttaagtctgcttgtatattctctgtctttcacataaatataaaccagcagattggatgccttaacaatgcaaatcatatccatttcacctgtacattgtactgtgcaccccccccaactgtcagccatcactaacattctaagaaaaaaaaaaaagaaaaagaagaaaaaaaaagagagaaatcgaaaagcacaaaagaactgttttgttactttaagacaatgttactttttctagtagagcaagagaacattaacaaagctgcgactgtgcatgcccggatggatttcaacggttttcactagactgtcagagtgcggatttttatgggttggggaggggaggggagggaagttgggggggttggtaggggaggggagggaggaaagctgatttttcatggtgagaaataataataatgacaactgatgataataataataataataaaaataaaaagaaactggaaaaaaatataagcaaggtttagcattgcttctccgtactcagaaaggttgtctgaattcgtgtggtaagcgctggcctcaagatgtctaacgtctaaagccatattttgtctggtgagccagacaactgtctgcaaaggaacgagcagcaagccggtgaggtgtccggctcagaccctgacaaaagacgccaccaatctgttagccacgtgctgtgacgtgatgagaactttactggaaagcccaaagagcctttaaaaagaaaatgtgtatcaattgtgttttgttacttctgtttgattagccgatggagaagtagtttggttttaggaaccactttcttctacacaaaatcttgtttttaagtccctttaagatatagccccctaaatacagaatatggcttttaaaaagaagatggagtagagaattcaattcagatttccgttttgggggaagagccctgcctctggatgactggatatgtccacgccatgcccggcctcacaatgtaggatgcagctccatgaactcattctgcaaatctttcaccttcttttcaaacgttttcaatagacacacactgtacaatccaattgttagagcactcaactactgtagagattgttatatttcattcttttttatttctttctttcttttcttttcttctcctttttttttttcaaaaattcaaactgtaaaaaacttttcaacgttcacgatatttaattaaagttacttcctgtctgtgatagca

SEQ ID NO: 69 - protein, 592 aa, Mus musculus; identical to SEQ ID NO: 25

SEQ ID NO: 70 - DNA, 2926 bp, Mus musculus
  source 1..2926: mol_type = genomic DNA
  CDS 374..2335: protein_id = 71; translation = MMNQSQRMAPVGSDKELSDLLDFSMMFPLPVANGKSRPASLGGTQF AGSGLEDRPSSGSWGSSDQNSSSFDPSRTYSEGAHFSDSHSSLPPSTFLGAGLGGKGSE RNAYATFGRDTSVGTLSQAGFLPGELSLSSPGPLSPSGIKSSSQYYPSFPSNPRRRAAD GGLADTQPKKVRKVPPGLPSSVYPPSSGDSYSRDAAAYPSAKTPSSAYPSPFYVADGSL HPSAELWSTPSQVGFGPMLGDGSSPLPLAPGSSSVGSGTFGGLQQQDRMGYQLHGSEVN GSLPAVSSFSAAPGTYSGTSGHTPPVSGAAAESLLGTRGTTASSSGDALGKALASIYSP DHSSNNFSPSPSTPVGSPQGLPGTSQWPRAGAPSALSPNYDAGLHGLQSKMEDRLDEAI HVLRSHAVGTASDLHGLLPGHGALTTSFTGPMSLGGRHAGLVGGSHPEEGLTSGASLLH NHASLPSQPSSLPDLSQRPPDSYSGLGRAGTTAGASEIKREEKEDEEIASVADAEEDKK DLKVPRTRTSPDEDEDDLLPPEQKAEREKERRVANNARERLRVRDINEAFKELGRMCQL HLSSEKPQTKLLILHQAVAVILSLEQQVRERNLNPKAACLKRREEEKVSGVVGDPQLAL SAAHPGLGEAHNPAGHL
atgtctcccgccgcaggaagatgaggcagcgccggcggctgcgggcgtagcgggccaccgcgggccaccgccgcgcgccgccgcctctgctacagtcccttcccgcggggcctgctctgagagaagctcgagagagaccaggcgacgcgaacgcgagtggggaggaggaaggacgcgcgaccccgagccctgcgcgctcccgccgcccacgcgcgaccctcggggacgcgcccgccacccttttgtccccggggtccccgagggcggtgggcagcagggagccccggtgcacccggtgcatgcccccgcccagcagggctgtctctagatctgggggacgcaccccagttccaacacctgctgtcctgggtggatgatgaaccagtctcagagaatggcacccgtgggctctgacaaggaactgagtgacctcctggacttcagcatgatgttcccgctacctgtggccaatgggaagagccggcccgcctccctcgggggaacccagtttgcaggctcaggactggaggaccgacccagctcaggctcctggggcagcagtgaccagaacagttcttcctttgaccctagccggacatacagcgaaggtgcccacttcagtgactcccacagcagcctgccgccttccacgttcctaggagctgggcttggaggcaagggcagtgagcggaatgcctatgccacctttgggagagacaccagtgttggcaccttgagtcaggctggcttcctgccaggtgagctgagcctcagcagtcccgggccactgtccccatcgggcatcaagagcagctcccagtattacccctcattccccagcaaccctcgtcggagagctgcagatggtggcctggcagatactcagccgaagaaggtccggaaggttccgcctggtctcccttcctcggtgtatccgcccagctcaggtgacagctacagcagggatgctgcagcctacccctccgccaagacccccagcagcgcttacccctcccccttctacgtggcagatggcagcctgcacccatcagctgagctctggagtacgcctagccaggtgggctttgggcccatgctaggtgacggctcttcccctctgccccttgcaccgggcagcagctccgtgggcagtggtacctttgggggcctccagcagcaggatcgcatgggctaccagctgcatggatctgaggttaatggctcgctcccagctgtatccagcttttcggctgcccctggcacttacagtgggacttccggccacacgccccctgtgagtggggccgcagctgaaagcctcctaggcacccgagggactacagccagcagctcaggggatgcccttgggaaggcactggcctcgatctactccccggatcactccagcaataatttctcacctagcccctcaacgcctgtgggttcaccccagggcctgccagggacatcacagtggccccgggcaggagcgcccagtgccttatcccccaactacgatgcaggtctccatggcctgcagagcaagatggaggaccgcttggacgaggccatccatgtcctgcgaagccacgctgttggcaccgctagcgatctccatgggcttttgcctggccatggcgcactgaccacgagcttcaccggccccatgtcactgggcgggcggcatgccggcctggtcgggggaagccatcctgaggagggcctcacaagtggggccagtcttttgcataaccatgccagcctccccagccagcccagttccctccctgacctctcacagagacctcccgactcctatagtggactcgggagggcaggcacaacagcgggtgccagcgagatcaagcgggaggagaaagaggatgaggaaatcgcatcagtagccgacgccgaagaggacaagaaggacctgaaggtcccacgcacgcgcaccagcccagacgaggacgaggacgaccttctccccccagagcagaaggcggagcgggagaaggagcgccgggtggccaataatgcccgagagcgcctgcgggtccgcgacatcaatgaggcctttaaggagctcggccgcatgtgccagctgcacctcagcagcgagaagccgcagaccaaactgctcatcctgcaccaggccgtggccgtcatcctcagcctggagcagcaggtgcgagaacgcaacctgaaccccaaagcagcctgcttgaagcggagggaggaggagaaggtgtctggcgtggtcggggacccacagctggccctgtcagccgcccacccgggcctgggtgaggcccacaacccagccgggcacctgtgagccgtcacagcttcttcgttggaccagggaccaccatatctctgcccggggtgcatcaggacggttctggatgagacaggtctccatcgaagcatgagcagagagagggctctggggacacttcagggcctggggagggtggcactgaacagctccctgcttggccccagtgaccaagcagaaaagttccttcctctcggttaaccagaactggaaacaaagcagcatgctcccttttcaaaaaggaaagaaagatgccttaactatgtaagacggaagagtcggaccgtgccctggcagggcggcctgggactggcttctacttcagagccaccagcacatcgtgcctaagcatttttcgtttttttaaaggagaataaaggaacattagttttcagattttttttttaaatgtagacaaaagttagcaagaacgaggccttccgtgtcttttttttttcccttagcttttttttccgtatgttttgtaagcaacaaatttttgtataaaagtctcatgtctgtttctgtttctagaatttatcgtcatatttcatggtctacaaggttattaaagtagcattcaaaaga

SEQ ID NO: 71 - protein, 653 aa, Mus musculus
MMNQSQRMAPVGSDKELSDLLDFSMMFPLPVANGKSRPASLGGTQFAGSGLEDRPSSGSWGSSDQNSSSFDPSRTYSEGAHFSDSHSSLPPSTFLGAGLGGKGSERNAYATFGRDTSVGTLSQAGFLPGELSLSSPGPLSPSGIKSSSQYYPSFPSNPRRRAADGGLADTQPKKVRKVPPGLPSSVYPPSSGDSYSRDAAAYPSAKTPSSAYPSPFYVADGSLHPSAELWSTPSQVGFGPMLGDGSSPLPLAPGSSSVGSGTFGGLQQQDRMGYQLHGSEVNGSLPAVSSFSAAPGTYSGTSGHTPPVSGAAAESLLGTRGTTASSSGDALGKALASIYSPDHSSNNFSPSPSTPVGSPQGLPGTSQWPRAGAPSALSPNYDAGLHGLQSKMEDRLDEAIHVLRSHAVGTASDLHGLLPGHGALTTSFTGPMSLGGRHAGLVGGSHPEEGLTSGASLLHNHASLPSQPSSLPDLSQRPPDSYSGLGRAGTTAGASEIKREEKEDEEIASVADAEEDKKDLKVPRTRTSPDEDEDDLLPPEQKAEREKERRVANNARERLRVRDINEAFKELGRMCQLHLSSEKPQTKLLILHQAVAVILSLEQQVRERNLNPKAACLKRREEEKVSGVVGDPQLALSAAHPGLGEAHNPAGHL

1. A nucleic acid molecule comprising a nucleic acid sequence encoding a developmental retinal ganglion cell (RGC) transcription factor, and
a promoter sequence in operable linkage with the nucleic acid sequence encoding the RGC transcription factor,
wherein the RGC transcription factor is selected from the group consisting of Onecut1, Pou4f2, Islet1, Irx2, Irx5, Neurod2, Ebf1, Tcf3, and combinations thereof; and
wherein the promoter sequence is HES1, RLBP1 or GLAST.

2. The nucleic acid molecule of claim 1, wherein the RGC transcription factor is selected from the group consisting of Onecut1, Pou4f2, and Islet1, and combinations thereof.

3. The nucleic acid molecule of claim 1, wherein the RGC transcription factor is Onecut1.

4. The nucleic acid molecule of claim 1, wherein the RGC transcription factor comprises Pou4f2 and/or Islet1.

5. The nucleic acid molecule of claim 1, wherein the RGC transcription factor is selected from the group consisting of Irx2, Irx5, Neurod2, Ebf1, Tcf3, and combinations thereof.

6. The nucleic acid molecule of claim 1, wherein the RGC transcription factor comprises Irx2 and/or Neurod2.

7. The nucleic acid molecule of claim 1, wherein the nucleic acid sequence further comprises a nucleic sequence that encodes a proneural basic helix-loop-helix (bHLH) transcription factor selected from Ascl1, Atoh1, and Atoh7.

8. (canceled)

9. The nucleic acid molecule of claim 8, wherein the promoter sequence further comprises a retinal ganglion cell (RGC)-specific promoter.

10. (canceled)

11. A composition comprising a nucleic acid molecule of claim 1.

12. The composition of claim 11, further comprising a histone deacetylase (HDAC) inhibitor.

13. The composition of claim 12, wherein the HDAC inhibitor is trichostatin A (TSA), (Pro)/romidepsin, (Pro)/belinostat, (Pro)/panobinostat, and/or (Pro)/vorinostat.

14. A method for stimulating regeneration of retinal ganglion cells in a subject, the method comprising: administering to a retina of the subject a composition of claim 11, thereby stimulating regeneration of retinal ganglion cells.

15. The method of claim 14, wherein the composition comprises a first nucleic acid molecule encoding a proneural bHLH transcription factor selected from the group consisting of Ascl1, Atoh1, or Atoh7, and a second nucleic acid molecule encoding a RGC transcription factor selected from the group consisting of Onecut1, Pou4f2, Islet1, Irx2, Irx5, Neurod2, Ebf1, Tcf3, and combinations thereof.

16. The method of claim 14, wherein the administering comprises a first administration of composition comprising a first nucleic acid molecule encoding a proneural bHLH transcription factor selected from the group consisting of Ascl1, Atoh1, or Atoh7, and a second administration at a subsequent time point of a composition comprising a second nucleic acid molecule encoding a RGC transcription factor selected from the group consisting of Onecut1, Pou4f2, Islet1, Islet1, Irx2, Irx5, Neurod2, Ebf1, Tcf3, and combinations thereof.

17. The method of claim 14, wherein the subject is treated for retinal disease, damage or degeneration in the retina.

18. The method of claim 14, wherein the subject is an adult.

19. (canceled)

20. (canceled)

21. The method of claim 20, wherein the nucleic acid molecule is an adeno-associated viral (AAV) vector or a lentiviral vector.

22. The method of claim 14, wherein the administering to the retina is intravitreal or subretinal injection.

23. The method of claim 15, wherein the proneural bHLH transcription factor and the RGC transcription factor are expressed as a fusion protein.

24. The method of claim 15, wherein the first and/or second nucleic acid molecule is an mRNA.

25. (canceled)
